(19) United States
(12) Patent Application Publication
(10) Pub. No.: US 2011/0189233 A1
(43) Pub. Date: Aug. 4, 2011

(54) Recombinant Varicella-Zoster Virus

(76) Inventors: Kazuhiro Nagaike, Kagawa (JP); Yasuko Mori, Osaka (JP); Yasuyuki Gomi, Kagawa (JP); Michiaki Takahashi, Osaka (JP); Kouichi Yamanishi, Osaka (JP)

(21) Appl. No.: 10/591,787

(22) PCT Filed: Mar. 3, 2005
(86) PCT No.: PCT/JP2005/003652

§ 371 Date: Jul. 30, 2007

(30) Foreign Application Priority Data
Mar. 5, 2004 (JP) 2004-063277

(51) Int. Cl. A61K 39/25; C12N 7/01; C12N 15/63; C12N 1/21; C12N 5/08; C12N 15/00; C07H 21/00; A61P 37/00

(52) U.S. Cl. 424/230.1; 435/235.1; 435/320.1; 435/252.3; 435/252.33; 435/366; 435/456; 435/476; 536/23.1

(57) ABSTRACT

A recombinant varicella-zoster virus; a process for producing the same; a pharmacological composition containing recombinant varicella-zoster virus; a vector containing a genomic gene of varicella-zoster virus and BAC vector sequence; cells containing the above vector; a fragment capable of homologous recombination with a genome of varicella-zoster virus; and a nucleic acid cassette containing the BAC vector sequence. For these, there is provided a process for producing recombinant varicella-zoster virus, comprising use of the BAC vector sequence.

### BACKGROUND OF THE INVENTION

[0001] 1. Field of the Invention

[0002] The present invention relates to recombinant varicella-zoster virus, particularly recombinant varicella-zoster virus prepared using BAC (E. coli artificial chromosome), and a pharmaceutical composition comprising such a virus. Further, the present invention relates to a vector comprising a varicella-zoster virus genomic gene and a BAC vector sequence, and a cell containing such a vector. Further, the present invention relates to a method for producing recombinant varicella-zoster virus. Further, the present invention relates to a nucleic acid cassette comprising a fragment capable of homologous recombination with a varicella-zoster virus genome, and a BAC vector sequence.

[0003] 2. Description of the Related Art

[0004] Varicella-zoster virus (VZV) is a virus which belongs to viruses of the family Herpesviridae, and is responsible for diseases (varicella and zoster) which exhibit two different presentations. Early infection to this virus causes varicella (chicken pox). Then, the virus latently infects the ganglion. After a long period of time, this virus is reactivated by some cause, and then presents as zoster, which is a symptom that presents when virus particles are formed, the virus particles arrive at the epidermic cell through a nerve cell and form varicella in the region where nerve cells are present.

[0005] The VZV genome is double-stranded DNA of about 125000 bases. The whole base sequence has been determined by Davison et al. It is known that at least 72 genes are present on the genome.

[0006] The development of VZV vaccine is difficult. Oka strain of VZV vaccine is the one and only vaccine for a varicella virus in the world, developed by Takahashi, et al. (Japanese Laid-Open Publication No. 53-41202). The existing attenuated live varicella vaccine has been produced by employing virus derived from the attenuated live varicella virus Oka strain used as a seed, and has been practiced all over the world (Requirements for Varicella Vaccine (Live) Adopted 1984; Revised 1993: WHO Technical Report Series, No. 848, pp. 22-38, 1994). This Oka strain is obtained from a virus (Oka original strain) isolated from an affected infant that presents typical varicella, by passage through several generations employing human diploid cell after passage through 12 generations, employing human embryonic lung cell at 34 centigrade, and through 11 generations by employing guinea-pig embryonal cell. The Oka original strain is of high pathogenicity. On the contrary, it is recognized that the Oka vaccine strain (Oka strain) has very little side-effects to a normal child. As such, the Oka strain is useful as a vaccine strain having very little pathogenicity.

[0007] A virus vaccine has a possibility of changing its genotype of the virus through passage. There is also a possibility that the Oka strain has a genetic variety because a lot of passages are done in the process of preparing the Oka strain. Practically, to ensure its safety and effectiveness, considering genetic changes of a virus through passages in the process of producing a vaccine, a seed lot system has been established that limits the number of passages of a varicella seed virus which is approved to be produced, that is, employing a virus as a vaccine within 10 generations from the total number of passages, on the basis that the number of passages is 0 at the time of approval of seed.

[0008] On the other hand, from the follow-up of the effect of a varicella vaccine and post-marketing Surveillance (PMS), or in terms of epidemiology, the analysis of virological difference between a fresh field strain of varicella virus which is separated from a varicella patient by natural infection and a vaccine strain derived from the above-mentioned Oka strain has been necessary, resulting in that the various analyses employing the techniques from immunology, genetic engineering, and the like have been already done. For example, the judgment based on trials, such as the differences of gene structures, DNA base sequences, and the like between varicella virus strains (Journal of General Virology, 59, 660-668, 1986; 67, 1759-1816, 1986), presence of restriction enzyme Pst I site (Japanese Journal of Experimental Medicine, 59, 233-237, 1989), RFLP (Restriction Fragment Length Polymorphism) employing PCR (Polymerase Chain Reaction) (Journal of Virology, 66, 1016-1020, 1992), and the combination of the above-mentioned presence of Pst I site and RFLP (Journal of Clinical Microbiology, 33, 658-660, 1995), have been reported. Although these trials propose conditions for identifying a fresh field strain from the vaccine strain derived from the Oka strain, it lacks the reliability and is not conclusive because of the genetic variety of the Oka Strain itself, and therefore, there still exist problems in terms of quality control. Further, the method of identifying Oka strain of a varicella virus by employing the gene 14 region of a varicella virus (U.S. Pat. No. 6,093,535), the method of identifying a virus strain for an attenuated live varicella vaccine by employing the gene 62 region (International Publication No. WO 00/50603), and the like are also known. These techniques make it possible to identify the differences among the following three strains; the Oka strain of varicella virus (high virulent parent strain), a vaccine strain derived therefrom (an attenuated Oka strain), and a varicella virus strain other than the Oka strain. However, the criterion of preparation of an attenuated live varicella vaccine for quality control and quality assurance would not be sufficient.

[0009] As it is now, quality control by evaluating and identifying the quality of vaccine, such as by direct or quantitative gene analysis for genome DNA of seed virus and vaccine virus has not been practiced. Therefore, the accuracy of quality control and quality assurance of an attenuated strain for live vaccine cannot be calculated, and therefore, is ambiguous. Accordingly, to increase the accuracy of quality control and quality assurance is extremely important to secure and ensure the effectiveness, safety, and homogeneity of an attenuated live varicella vaccine. However, as mentioned above, the method for the foregoing has not been established, and the problems have still remained to be solved as tasks of pressing urgency.

[0010] Also, to develop an altered varicella-zoster virus vaccine which is superior to the Oka strain, recombinant varicella-zoster virus by mutagenesis, and a production method thereof has been desired.

### DISCLOSURE OF THE INVENTION

### The Problem to be Solved by the Invention

[0011] An object of the present invention is to increase the accuracy of quality control and quality assurance, and securing and ensuring the effectiveness, safety, and homogeneity of an attenuated live varicella vaccine. Further, a problem to be solved by the present invention is, in order to develop variant varicella-zoster virus vaccine superior to Oka strain, establishing a method to produce recombinant varicella-zoster virus by mutagenesis, and producing such a virus.

[0012] To achieve this, the present invention provides recombinant varicella-zoster virus, and a production method thereof, e.g., a method for producing recombinant varicella-zoster virus from a single virus strain using a BAC (Bacterial artificial chromosome).

### SUMMARY OF THE INVENTION

[0013] The present inventors developed a method for producing recombinant varicella-zoster virus using a BAC vector sequence to complete the present invention.

[0014] Therefore, the present invention provides the following.
[0015] 1. A recombinant varicella-zoster virus.
[0016] 2. A recombinant varicella-zoster virus of item 1, comprising a BAC vector sequence.
[0017] 3. The recombinant varicella-zoster virus of item 2, wherein at least part of the BAC vector sequence is inserted into a non-essential region of a varicella-zoster virus genome.
[0018] 4. The recombinant varicella-zoster virus of item 3, wherein the non-essential region is selected from the group consisting of the following regions:
[0019] the region in the ORF of gene 7, the region in the ORF of gene 8, the region in the ORF of gene 9, the region in the ORF of gene 10, the region in the ORF of gene 11, the region in the ORF of gene 12, the region in the ORF of gene 13, the region in the ORF of gene 14, the region in the ORF of gene 15, the region in the ORF of gene 17, the region in the ORF of gene 18, the region in the ORF of gene 19, the region in the ORF of gene 38, the region in the ORF of gene 39, the region in the ORF of gene 46, the region in the ORF of gene 47, the region in the ORF of gene 48, the region in the ORF of gene 49, the region in the ORF of gene 50, the region in the ORF of gene 56, the region in the ORF of gene 57, the region in the ORF of gene 58, the region in the ORF of gene 59, the region in the ORF of gene 61, the region in the ORF of gene 62, the region in the ORF of gene 63, the region in the ORF of gene 64, the region in the ORF of gene 65, the region in the ORF of gene 66, the region in the ORF of gene 67, the region in the ORF of gene 68, the region in the ORF of gene 69, the region in the ORF of gene 70, the region flanking the ORF of gene 7, the region flanking the ORF of gene 8, the region flanking the ORF of gene 9, the region flanking the ORF of gene 10, the region flanking the ORF of gene 11, the region flanking the ORF of gene 12, the region flanking the ORF of gene 13, the region flanking the ORF of gene 14, the region flanking the ORF of gene 15, the region flanking the ORF of gene 17, the region flanking the ORF of gene 18, the region flanking the ORF of gene 19, the region flanking the ORF of gene 38, the region flanking the ORF of gene 39, the region flanking the ORF of gene 46, the region flanking the ORF of gene 47, the region flanking the ORF of gene 48, the region flanking the ORF of gene 49, the region flanking the ORF of gene 50, the region flanking the ORF of gene 56, the region flanking the ORF of gene 57, the region flanking the ORF of gene 58, the region flanking the ORF of gene 59, the region flanking the ORF of gene 61, the region flanking the ORF of gene 62, the region flanking the ORF of gene 63, the region flanking the ORF of gene 64, the region flanking the ORF of gene 65, the region flanking the ORF of gene 66, the region flanking the ORF of gene 67, the region flanking the ORF of gene 68, the region flanking the ORF of gene 69, the region flanking the ORF of gene 70.
[0020] 5. The recombinant varicella-zoster virus of item 4, wherein the non-essential region is the region flanking the ORF of gene 11, or the region flanking the ORF of gene 12.
[0021] 6. The recombinant varicella-zoster virus of item 2, wherein at least part of the BAC vector sequence is inserted into the region in the ORF of gene 62 of a varicella-zoster virus genome.
[0022] 7. The recombinant varicella-zoster virus of item 2, wherein the BAC vector sequence comprises a recombinant protein dependent recombinant sequence.
[0023] 8. The recombinant varicella-zoster virus of item 2, wherein the BAC vector sequence comprises a selectable marker.
[0024] 9. The recombinant varicella-zoster virus of item 8, wherein the selectable marker is a drug selectable marker.
[0025] 10. The recombinant varicella-zoster virus of item 2, wherein the selectable marker is a gene encoding green fluorescent protein.
[0026] 11. The recombinant varicella-zoster virus of item 2, wherein the varicella-zoster virus genome is derived from a wild type strain.
[0027] 12. The recombinant varicella-zoster virus of item 2, wherein the varicella-zoster virus genome is derived from a mutant type strain.
[0028] 13. The recombinant varicella-zoster virus of item 2, wherein the varicella-zoster virus genome is derived from Oka vaccine strain.
[0029] 14. The recombinant varicella-zoster virus of item 2, wherein the varicella-zoster virus genome has mutations in gene 62 and gene 6.
[0030] 15. The recombinant varicella-zoster virus of item 14, wherein the gene 62 comprises at least the base substitutions of the following (a)-(d) in SEQ ID NO. 5:
[0031] (a) base substitution at position 2110 for G;
[0032] (b) base substitution at position 3100 for G;
[0033] (c) base substitution at position 3818 for C; and
[0034] (d) base substitution at position 4006 for G,
[0035] and, the gene 6 comprises at least a base substitution at porision 5745 for G, in SEQ ID NO. 8.
[0036] 16. The recombinant varicella-zoster virus of item 2, wherein the BAC vector sequence comprises the sequence set forth in SEQ ID NO.: 7.
[0037] 17. A pharmaceutical composition comprising the virus of item 1.
[0038] 18. The pharmaceutical composition of item 17, wherein the composition is in the form of a vaccine.
[0039] 19. A vector comprising a varicella-zoster virus essential gene and a BAC vector sequence other than the gene 62.
[0040] 20. The vector of item 19, further comprising the gene 62.
[0041] 21. The vector of item 19, wherein a mammalian cell produces a varicella-zoster virus when the vector is introduced into the mammalian cell.
[0042] 22. The vector of item 19, wherein a portion where a sequence derived from the varicella-zoster virus genome is linked to the BAC vector sequence is within a non-essential region of the varicella-zoster virus genome.
[0043] 23. The vector of item 22, wherein the non-essential region is selected from the group consisting of the following regions of:
[0044] the region in the ORF of gene 7, the region in the ORF of gene 8, the region in the ORF of gene 9, the region in the ORF of gene 10, the region in the ORF of gene 11, the region in the ORF of gene 12, the region in the ORF of gene 13, the region in the ORF of gene 14, the region in the ORF of gene 15, the region in the ORF of gene 17, the region in the ORF of gene 18, the region in the ORF of gene 19, the region in the ORF of gene 38, the region in the ORF of gene 39, the region in the ORF of gene 46, the region in the ORF of gene 47, the region in the ORF of gene 48, the region in the ORF of gene 49, the region in the ORF of gene 50, the region in the ORF of gene 56, the region in the ORF of gene 57, the region in the ORF of gene 58, the region in the ORF of gene 59, the region in the ORF of gene 61, the region in the ORF of gene 62, the region in the ORF of gene 63, the region in the ORF of gene 64, the region in the ORF of gene 65, the region in the ORF of gene 66, the region in the ORF of gene 67, the region in the ORF of gene 68, the region in the ORF of gene 69, the region in the ORF of gene 70, the region flanking the ORF of gene 7, the region flanking the ORF of gene 8, the region flanking the ORF of gene 9, the region flanking the ORF of gene 10, the region flanking the ORF of gene 11, the region flanking the ORF of gene 12, the region flanking the ORF of gene 13, the region flanking the ORF of gene 14, the region flanking the ORF of gene 15, the region flanking the ORF of gene 17, the region flanking the ORF of gene 18, the region flanking the ORF of gene 19, the region flanking the ORF of gene 38, the region flanking the ORF of gene 39, the region flanking the ORF of gene 46, the region flanking the ORF of gene 47, the region flanking the ORF of gene 48, the region flanking the ORF of gene 49, the region flanking the ORF of gene 50, the region flanking the ORF of gene 56, the region flanking the ORF of gene 57, the region flanking the ORF of gene 58, the region flanking the ORF of gene 59, the region flanking the ORF of gene 61, the region flanking the ORF of gene 62, the region flanking the ORF of gene 63, the region flanking the ORF of gene 64, the region flanking the ORF of gene 65, the region flanking the ORF of gene 66, the region flanking the ORF of gene 67, the region flanking the ORF of gene 68, the region flanking the ORF of gene 69, the region flanking the ORF of gene 70.
[0045] 24. The vector of item 23, wherein the portion for linking is the region flanking the ORF of gene 11 and the region flanking the ORF of gene 12.
[0046] 25. The vector of item 19, wherein a portion where a sequence derived from the varicella-zoster virus genome is linked to the BAC vector sequence is in the ORF of gene 62 of the varicella-zoster virus genome.
[0047] 26. The vector of item 19, wherein the BAC vector sequence comprises recombinant protein dependent recombinant sequence.
[0048] 27. The vector of item 19, wherein the BAC vector sequence comprises a selectable marker.
[0049] 28. The vector of item 27, wherein the selectable marker is drug selectable marker.
[0050] 29. The vector of item 27, wherein the selectable marker is a gene encoding green fluorescent protein.
[0051] 30. The vector of item 19, wherein the varicella-zoster virus genome is derived from a wild type strain.
[0052] 31. The vector of item 19, wherein the varicella-zoster virus genome is derived from a mutant type strain.
[0053] 32. The vector of item 19, wherein the varicella-zoster virus genome is derived from Oka vaccine strain.
[0054] 33. The vector of item 19, wherein the varicella-zoster virus genome has mutations in gene 62 and gene 6.
[0055] 34. The vector of item 33, wherein the gene 62 comprises at least the base substitutions of the following (a)-(d) in SEQ ID NO. 5:
[0056] (a) base substitution at position 2110 for G;
[0057] (b) base substitution at position 3100 for G;
[0058] (c) base substitution at position 3818 for C; and
[0059] (d) base substitution at position 4006 for G,
[0060] and, the gene 6 comprises at least a base substitution at position 5745 for G, in SEQ ID NO. 8.
[0061] 35. The vector of item 19, wherein the BAC vector sequence comprises the sequence set forth in SEQ ID NO.: 7.
[0062] 36. A cell comprising the vector of item 19.
[0063] 37. The cell of item 36, wherein the cell is a bacterial cell.
[0064] 38. The bacterial cell of item 37, wherein the bacterial cell is E. coli.
[0065] 39. The cell of item 36, wherein the cell is a mammalian cell.
[0066] 40. The mammalian cell of item 39, wherein the mammalian cell is derived from human.
[0067] 41. A virus produced by the mammalian cell of item 39.
[0068] 42. A pharmaceutical composition comprising the virus of item 41.
[0069] 43. The pharmaceutical composition of item 42, wherein the composition is in the form of a vaccine.
[0070] 44. A method to produce recombinant varicella-zoster virus, comprising:

[0071] introducing a vector comprising a varicella-zoster virus genome essential gene other than gene 62 and a BAC vector sequence into a mammalian host cell; and

[0072] culturing the mammalian host cell to produce recombinant varicella-zoster virus.
[0073] 45. The method of item 44, wherein the vector further comprises the gene 62.
[0074] 46. The method of item 44, wherein the mammalian host cell is derived from human.
[0075] 47. The method of item 44, wherein the BAC vector sequence comprises at least two recombinant protein dependent recombinant sequences.
[0076] 48. The method of item 47, further comprising a step of recombination between the two recombinant protein dependent recombinant sequences.
[0077] 49. The method of item 44, wherein a portion where a sequence derived from the varicella-zoster virus genome is linked to the BAC vector sequence is within a non-essential region of the varicella-zoster virus genome.
[0078] 50. The method of item 49, wherein the non-essential region is selected from the group consisting of the following regions of:
[0079] the region in the ORF of gene 7, the region in the ORF of gene 8, the region in the ORF of gene 9, the region in the ORF of gene 10, the region in the ORF of gene 11, the region in the ORF of gene 12, the region in the ORF of gene 13, the region in the ORF of gene 14, the region in the ORF of gene 15, the region in the ORF of gene 17, the region in the ORF of gene 18, the region in the ORF of gene 19, the region in the ORF of gene 38, the region in the ORF of gene 39, the region in the ORF of gene 46, the region in the ORF of gene 47, the region in the ORF of gene 48, the region in the ORF of gene 49, the region in the ORF of gene 50, the region in the ORF of gene 56, the region in the ORF of gene 57, the region in the ORF of gene 58, the region in the ORF of gene 59, the region in the ORF of gene 61, the region in the ORF of gene 62, the region in the ORF of gene 63, the region in the ORF of gene 64, the region in the ORF of gene 65, the region in the ORF of gene 66, the region in the ORF of gene 67, the region in the ORF of gene 68, the region in the ORF of gene 69, the region in the ORF of gene 70, the region flanking the ORF of gene 7, the region flanking the ORF of gene 8, the region flanking the ORF of gene 9, the region flanking the ORF of gene 10, the region flanking the ORF of gene 11, the region flanking the ORF of gene 12, the region flanking the ORF of gene 13, the region flanking the ORF of gene 14, the region flanking the ORF of gene 15, the region flanking the ORF of gene 17, the region flanking the ORF of gene 18, the region flanking the ORF of gene 19, the region flanking the ORF of gene 38, the region flanking the ORF of gene 39, the region flanking the ORF of gene 46, the region flanking the ORF of gene 47, the region flanking the ORF of gene 48, the region flanking the ORF of gene 49, the region flanking the ORF of gene 50, the region flanking the ORF of gene 56, the region flanking the ORF of gene 57, the region flanking the ORF of gene 58, the region flanking the ORF of gene 59, the region flanking the ORF of gene 61, the region flanking the ORF of gene 62, the region flanking the ORF of gene 63, the region flanking the ORF of gene 64, the region flanking the ORF of gene 65, the region flanking the ORF of gene 66, the region flanking the ORF of gene 67, the region flanking the ORF of gene 68, the region flanking the ORF of gene 69, the region flanking the ORF of gene 70.
[0080] 51. The vector of item 50, wherein the portion which is linked is the region of flanking the ORF of gene 11 or the region flanking the ORF of gene 12.
[0081] 52. The vector of item 44, wherein a portion where a sequence derived from the varicella-zoster virus genome is linked to the BAC vector sequence is in the ORF of gene 62 of the varicella-zoster virus genome.
[0082] 53. The method of item 44, wherein the BAC vector sequence comprises a recombinant protein dependent recombinant sequence.
[0083] 54. The method of item 44, wherein the BAC vector sequence comprises a selectable marker.
[0084] 55. The method of item 54, wherein the selectable marker is a drug selectable marker.
[0085] 56. The method of item 54, wherein the selectable marker is a gene encoding green fluorescent protein.
[0086] 57. The method of item 44, wherein the varicella-zoster virus genome is derived from a wild type strain.
[0087] 58. The method of item 44, wherein the varicella-zoster virus genome is derived from a mutant type strain.
[0088] 59. The method of item 44, wherein the varicella-zoster virus genome is derived from Oka vaccine strain.
[0089] 60. The method of item 44, wherein the varicella-zoster virus genome has mutations in gene 62 and gene 6.
[0090] 61. The method of item 60, wherein the gene 62 comprises at least the base substitutions of the following (a)-(d) in SEQ ID NO. 5:
[0091] (a) base substitution at position 2110 for G;
[0092] (b) base substitution at position 3100 for G;
[0093] (c) base substitution at position 3818 for C; and
[0094] (d) base substitution at position 4006 for G,
[0095] and, the gene 6 comprises at least a base substitution at position 5745 for G, in SEQ ID NO. 8.
[0096] 62. The method of item 44, wherein the BAC vector sequence comprises the sequence set forth in SEQ ID NO.: 7.
[0097] 63. A virus produced by the method of item 44.
[0098] 64. A pharmaceutical composition comprising the virus of item 63.
[0099] 65. The pharmaceutical composition of item 64, wherein the composition is in the form of a vaccine.
[0100] 66. A method to introduce a mutation into the vector of item 19, comprising:

[0101] introducing the vector into a bacterial host cell;

[0102] introducing a plasmid vector comprising a fragment consisting of a portion of varicella-zoster virus genome into the bacterial host cell, wherein the fragment has at least one mutation;

[0103] culturing the bacterial host cell;

[0104] isolating a vector having BAC sequence from the cultured bacterial host cell.
[0105] 67. A method to introduce a mutation into the vector of item 19, comprising:

[0106] introducing the vector into a bacterial host cell;

[0107] introducing a first plasmid vector comprising a first fragment consisting of a portion of varicella-zoster virus genome into the bacterial host cell, wherein the first fragment has at least one mutation;

[0108] introducing a second plasmid vector comprising a second fragment consisting of a portion of varicella-zoster virus genome into the bacterial host cell, wherein the second fragment has at least one mutation, and the first fragment is different from the second fragment;

[0109] culturing the bacterial host cell;

[0110] isolating a vector having BAC sequence from the cultured bacterial host cell.
[0111] 68. A nucleic acid cassette comprising a first fragment which can recombine with varicella-zoster virus genome in a bacterial cell, BAC vector sequence, and a second fragment which can recombine with varicella-zoster virus genome in a bacterial cell,

[0112] wherein the both ends of the BAC sequence are linked to the first and the second fragment, respectively.
[0113] 69. The nucleic acid cassette of item 68, wherein the first fragment and the second fragment are at least 1 kb.
[0114] 70. The nucleic acid cassette of item 68, wherein the first fragment and the second fragment are at least 1.5 kb.
[0115] 71. The nucleic acid cassette of item 68, wherein the first fragment and the second fragment are at least 2 kb.
[0116] 72. The nucleic acid cassette of item 68, wherein the first fragment and the second fragment are at least 80% identical with a varicella-zoster virus genome sequence.
[0117] 73. The nucleic acid cassette of item 68, wherein the first fragment and the second fragment are at least 85% identical with a varicella-zoster virus genome sequence.
[0118] 74. The nucleic acid cassette of item 68, wherein the first fragment and the second fragment are at least 90% identical with a varicella-zoster virus genome sequence.
[0119] 75. The nucleic acid cassette of item 68, wherein the first fragment and the second fragment are at least 95% identical with a varicella-zoster virus genome sequence.
[0120] 76. The nucleic acid cassette of item 68, wherein each of the first fragment and the second fragment are independently selected from the group consisting of the following regions of varicella-zoster virus genome:
[0121] the region in the ORF of gene 7, the region in the ORF of gene 8, the region in the ORF of gene 9, the region in the ORF of gene 10, the region in the ORF of gene 11, the region in the ORF of gene 12, the region in the ORF of gene 13, the region in the ORF of gene 14, the region in the ORF of gene 15, the region in the ORF of gene 17, the region in the ORF of gene 18, the region in the ORF of gene 19, the region in the ORF of gene 38, the region in the ORF of gene 39, the region in the ORF of gene 46, the region in the ORF of gene 47, the region in the ORF of gene 48, the region in the ORF of gene 49, the region in the ORF of gene 50, the region in the ORF of gene 56, the region in the ORF of gene 57, the region in the ORF of gene 58, the region in the ORF of gene 59, the region in the ORF of gene 61, the region in the ORF of gene 62, the region in the ORF of gene 63, the region in the ORF of gene 64, the region in the ORF of gene 65, the region in the ORF of gene 66, the region in the ORF of gene 67, the region in the ORF of gene 68, the region in the ORF of gene 69, the region in the ORF of gene 70, the region flanking the ORF of gene 7, the region flanking the ORF of gene 8, the region flanking the ORF of gene 9, the region flanking the ORF of gene 10, the region flanking the ORF of gene 11, the region flanking the ORF of gene 12, the region flanking the ORF of gene 13, the region flanking the ORF of gene 14, the region flanking the ORF of gene 15, the region flanking the ORF of gene 17, the region flanking the ORF of gene 18, the region flanking the ORF of gene 19, the region flanking the ORF of gene 38, the region flanking the ORF of gene 39, the region flanking the ORF of gene 46, the region flanking the ORF of gene 47, the region flanking the ORF of gene 48, the region flanking the ORF of gene 49, the region flanking the ORF of gene 50, the region flanking the ORF of gene 56, the region flanking the ORF of gene 57, the region flanking the ORF of gene 58, the region flanking the ORF of gene 59, the region flanking the ORF of gene 61, the region flanking the ORF of gene 62, the region flanking the ORF of gene 63, the region flanking the ORF of gene 64, the region flanking the ORF of gene 65, the region flanking the ORF of gene 66, the region flanking the ORF of gene 67, the region flanking the ORF of gene 68, the region flanking the ORF of gene 69, the region flanking the ORF of gene 70.
[0122] 77. The nucleic acid cassette of item 68, wherein each of the first fragment and the second fragment is independently at least 80% identical with the region selected from the group consisting of the following regions of varicella-zoster virus genome:
[0123] the region in the ORF of gene 7, the region in the ORF of gene 8, the region in the ORF of gene 9, the region in the ORF of gene 10, the region in the ORF of gene 11, the region in the ORF of gene 12, the region in the ORF of gene 13, the region in the ORF of gene 14, the region in the ORF of gene 15, the region in the ORF of gene 17, the region in the ORF of gene 18, the region in the ORF of gene 19, the region in the ORF of gene 38, the region in the ORF of gene 39, the region in the ORF of gene 46, the region in the ORF of gene 47, the region in the ORF of gene 48, the region in the ORF of gene 49, the region in the ORF of gene 50, the region in the ORF of gene 56, the region in the ORF of gene 57, the region in the ORF of gene 58, the region in the ORF of gene 59, the region in the ORF of gene 61, the region in the ORF of gene 62, the region in the ORF of gene 63, the region in the ORF of gene 64, the region in the ORF of gene 65, the region in the ORF of gene 66, the region in the ORF of gene 67, the region in the ORF of gene 68, the region in the ORF of gene 69, the region in the ORF of gene 70, the region flanking the ORF of gene 7, the region flanking the ORF of gene 8, the region flanking the ORF of gene 9, the region flanking the ORF of gene 10, the region flanking the ORF of gene 11, the region flanking the ORF of gene 12, the region flanking the ORF of gene 13, the region flanking the ORF of gene 14, the region flanking the ORF of gene 15, the region flanking the ORF of gene 17, the region flanking the ORF of gene 18, the region flanking the ORF of gene 19, the region flanking the ORF of gene 38, the region flanking the ORF of gene 39, the region flanking the ORF of gene 46, the region flanking the ORF of gene 47, the region flanking the ORF of gene 48, the region flanking the ORF of gene 49, the region flanking the ORF of gene 50, the region flanking the ORF of gene 56, the region flanking the ORF of gene 57, the region flanking the ORF of gene 58, the region flanking the ORF of gene 59, the region flanking the ORF of gene 61, the region flanking the ORF of gene 62, the region flanking the ORF of gene 63, the region flanking the ORF of gene 64, the region flanking the ORF of gene 65, the region flanking the ORF of gene 66, the region flanking the ORF of gene 67, the region flanking the ORF of gene 68, the region flanking the ORF of gene 69, the region flanking the ORF of gene 70.
[0124] 78. The nucleic acid cassette of item 68, wherein each of the first fragment and the second fragment is independently at least 85% identical with the region selected from the group consisting of the following regions of varicella-zoster virus genome:
[0125] the region in the ORF of gene 7, the region in the ORF of gene 8, the region in the ORF of gene 9, the region in the ORF of gene 10, the region in the ORF of gene 11, the region in the ORF of gene 12, the region in the ORF of gene 13, the region in the ORF of gene 14, the region in the ORF of gene 15, the region in the ORF of gene 17, the region in the ORF of gene 18, the region in the ORF of gene 19, the region in the ORF of gene 38, the region in the ORF of gene 39, the region in the ORF of gene 46, the region in the ORF of gene 47, the region in the ORF of gene 48, the region in the ORF of gene 49, the region in the ORF of gene 50, the region in the ORF of gene 56, the region in the ORF of gene 57, the region in the ORF of gene 58, the region in the ORF of gene 59, the region in the ORF of gene 61, the region in the ORF of gene 62, the region in the ORF of gene 63, the region in the ORF of gene 64, the region in the ORF of gene 65, the region in the ORF of gene 66, the region in the ORF of gene 67, the region in the ORF of gene 68, the region in the ORF of gene 69, the region in the ORF of gene 70, the region flanking the ORF of gene 7, the region flanking the ORF of gene 8, the region flanking the ORF of gene 9, the region flanking the ORF of gene 10, the region flanking the ORF of gene 11, the region flanking the ORF of gene 12, the region flanking the ORF of gene 13, the region flanking the ORF of gene 14, the region flanking the ORF of gene 15, the region flanking the ORF of gene 17, the region flanking the ORF of gene 18, the region flanking the ORF of gene 19, the region flanking the ORF of gene 38, the region flanking the ORF of gene 39, the region flanking the ORF of gene 46, the region flanking the ORF of gene 47, the region flanking the ORF of gene 48, the region flanking the ORF of gene 49, the region flanking the ORF of gene 50, the region flanking the ORF of gene 56, the region flanking the ORF of gene 57, the region flanking the ORF of gene 58, the region flanking the ORF of gene 59, the region flanking the ORF of gene 61, the region flanking the ORF of gene 62, the region flanking the ORF of gene 63, the region flanking the ORF of gene 64, the region flanking the ORF of gene 65, the region flanking the ORF of gene 66, the region flanking the ORF of gene 67, the region flanking the ORF of gene 68, the region flanking the ORF of gene 69, the region flanking the ORF of gene 70.
[0126] 79. The nucleic acid cassette of item 68, wherein each of the first fragment and the second fragment is independently at least 90% identical with the region selected from the group consisting of the following regions of varicella-zoster virus genome:
[0127] the region in the ORF of gene 7, the region in the ORF of gene 8, the region in the ORF of gene 9, the region in the ORF of gene 10, the region in the ORF of gene 11, the region in the ORF of gene 12, the region in the ORF of gene 13, the region in the ORF of gene 14, the region in the ORF of gene 15, the region in the ORF of gene 17, the region in the ORF of gene 18, the region in the ORF of gene 19, the region in the ORF of gene 38, the region in the ORF of gene 39, the region in the ORF of gene 46, the region in the ORF of gene 47, the region in the ORF of gene 48, the region in the ORF of gene 49, the region in the ORF of gene 50, the region in the ORF of gene 56, the region in the ORF of gene 57, the region in the ORF of gene 58, the region in the ORF of gene 59, the region in the ORF of gene 61, the region in the ORF of gene 62, the region in the ORF of gene 63, the region in the ORF of gene 64, the region in the ORF of gene 65, the region in the ORF of gene 66, the region in the ORF of gene 67, the region in the ORF of gene 68, the region in the ORF of gene 69, the region in the ORF of gene 70, the region flanking the ORF of gene 7, the region flanking the ORF of gene 8, the region flanking the ORF of gene 9, the region flanking the ORF of gene 10, the region flanking the ORF of gene 11, the region flanking the ORF of gene 12, the region flanking the ORF of gene 13, the region flanking the ORF of gene 14, the region flanking the ORF of gene 15, the region flanking the ORF of gene 17, the region flanking the ORF of gene 18, the region flanking the ORF of gene 19, the region flanking the ORF of gene 38, the region flanking the ORF of gene 39, the region flanking the ORF of gene 46, the region flanking the ORF of gene 47, the region flanking the ORF of gene 48, the region flanking the ORF of gene 49, the region flanking the ORF of gene 50, the region flanking the ORF of gene 56, the region flanking the ORF of gene 57, the region flanking the ORF of gene 58, the region flanking the ORF of gene 59, the region flanking the ORF of gene 61, the region flanking the ORF of gene 62, the region flanking the ORF of gene 63, the region flanking the ORF of gene 64, the region flanking the ORF of gene 65, the region flanking the ORF of gene 66, the region flanking the ORF of gene 67, the region flanking the ORF of gene 68, the region flanking the ORF of gene 69, the region flanking the ORF of gene 70.
[0128] 80. The nucleic acid cassette of item 68, wherein each of the first fragment and the second fragment is independently at least 95% identical with the region selected from the group consisting of the following regions of varicella-zoster virus genome:
[0129] the region in the ORF of gene 7, the region in the ORF of gene 8, the region in the ORF of gene 9, the region in the ORF of gene 10, the region in the ORF of gene 11, the region in the ORF of gene 12, the region in the ORF of gene 13, the region in the ORF of gene 14, the region in the ORF of gene 15, the region in the ORF of gene 17, the region in the ORF of gene 18, the region in the ORF of gene 19, the region in the ORF of gene 38, the region in the ORF of gene 39, the region in the ORF of gene 46, the region in the ORF of gene 47, the region in the ORF of gene 48, the region in the ORF of gene 49, the region in the ORF of gene 50, the region in the ORF of gene 56, the region in the ORF of gene 57, the region in the ORF of gene 58, the region in the ORF of gene 59, the region in the ORF of gene 61, the region in the ORF of gene 62, the region in the ORF of gene 63, the region in the ORF of gene 64, the region in the ORF of gene 65, the region in the ORF of gene 66, the region in the ORF of gene 67, the region in the ORF of gene 68, the region in the ORF of gene 69, the region in the ORF of gene 70, the region flanking the ORF of gene 7, the region flanking the ORF of gene 8, the region flanking the ORF of gene 9, the region flanking the ORF of gene 10, the region flanking the ORF of gene 11, the region flanking the ORF of gene 12, the region flanking the ORF of gene 13, the region flanking the ORF of gene 14, the region flanking the ORF of gene 15, the region flanking the ORF of gene 17, the region flanking the ORF of gene 18, the region flanking the ORF of gene 19, the region flanking the ORF of gene 38, the region flanking the ORF of gene 39, the region flanking the ORF of gene 46, the region flanking the ORF of gene 47, the region flanking the ORF of gene 48, the region flanking the ORF of gene 49, the region flanking the ORF of gene 50, the region flanking the ORF of gene 56, the region flanking the ORF of gene 57, the region flanking the ORF of gene 58, the region flanking the ORF of gene 59, the region flanking the ORF of gene 61, the region flanking the ORF of gene 62, the region flanking the ORF of gene 63, the region flanking the ORF of gene 64, the region flanking the ORF of gene 65, the region flanking the ORF of gene 66, the region flanking the ORF of gene 67, the region flanking the ORF of gene 68, the region flanking the ORF of gene 69, the region flanking the ORF of gene 70.
[0130] 81. The nucleic acid cassette of item 68, wherein the first fragment and the second fragment are derived from different regions.
[0131] 82. The nucleic acid cassette of item 72, wherein each of the first fragment and the second fragment are independently from the region flanking the ORF of gene 11 and the region flanking the ORF of gene 12.
[0132] 83. The nucleic acid cassette of item 68, wherein the BAC vector sequence comprises a recombinant protein dependent recombinant sequence.
[0133] 84. The nucleic acid cassette of item 68, wherein the BAC vector sequence comprises a selectable marker.
[0134] 85. The nucleic acid cassette of item 84, wherein the selectable marker is drug selectable marker.
[0135] 86. The nucleic acid cassette of item 68, wherein the selectable marker is a gene encoding green fluorescent protein.
[0136] 87. The nucleic acid cassette of item 68, wherein the varicella-zoster virus genome is derived from a wild type strain.
[0137] 88. The nucleic acid cassette of item 68, wherein the varicella-zoster virus genome is derived from a mutant type strain.
[0138] 89. The nucleic acid cassette of item 68, wherein the varicella-zoster virus genome is derived from Oka vaccine strain.
[0139] 90. The nucleic acid cassette of item 68, wherein the BAC vector sequence comprises the sequence set forth in SEQ ID NO.: 7.
[0140] 91. The nucleic acid cassette of item 68, having a nucleic acid sequence set forth in SEQ ID NO.: 2.

[0141] The present invention provides recombinant varicella-zoster virus, and a production method thereof. For example, the present invention provides a method for producing recombinant varicella-zoster virus from a single viral strain using a BAC (E. coli artificial chromosome), and recombinant varicella-zoster virus produced by the method. Further, the present invention provides a pharmaceutical composition comprising recombinant varicella-zoster virus.

[0142] Further, the present invention provides a vector comprising a varicella-zoster viral genomic gene and a BAC vector sequence, and a cell containing such a vector, and a nucleic acid cassette comprising a fragment capable of homologous recombination with a varicella-zoster virus genome, and a BAC vector sequence.

### BRIEF DESCRIPTION OF THE DRAWINGS

[0143] FIG. 1 is a schematic diagram showing the production of the Oka strain genome of varicella-zoster virus and recombinant varicella-zoster virus.

[0144] FIG. 2 shows the comparison of proliferation in vitro between the Oka strain genome of varicella-zoster virus (parent strain) and the recombinant varicella-zoster virus (rV02).

### DESCRIPTION OF THE PREFERRED EMBODIMENTS

[0145] Hereinafter, the present invention will be described. It should be understood throughout the present specification that expression of a singular form includes the concept of their plurality unless otherwise mentioned. It should be also understood that the terms as used herein have definitions typically used in the art unless otherwise mentioned. Thus, unless otherwise defined, all scientific and technical terms have the same meanings as those generally used by those skilled in the art to which the present invention pertains. If there is contradiction, the present specification (including the definition) precedes.

[0146] Hereinafter, the present invention will be described. It should be understood throughout the present specification that expression of a singular form includes the concept of their plurality unless otherwise mentioned. Accordingly, for example, it should be understood that a singular article (for example, “a”, “an”, “the” in English) comprises the concepts of plural form unless otherwise mentioned. It should be also understood that the terms as used herein have definitions typically used in the art unless otherwise mentioned. Thus, unless otherwise defined, all scientific and technical terms have the same meanings as those generally used by those skilled in the art to which the present invention pertains. If there is contradiction, the present specification (including the definition) precedes.

### Definition of Terms

[0147] The definitions of terms used herein are described below.

[0148] As used herein, the term “essential gene” in relation to varicella-zoster virus refers to a gene which is essential for the growth of the varicella-zoster virus. Also, the term “non-essential gene” in relation to varicella-zoster virus refers to a gene which is not essential for the growth of the varicella-zoster virus, and in the absence of which the varicella-zoster virus can grow. Examples of non-essential genes of human varicella-zoster virus include, but are not limited to: gene 7, gene 8, gene 9, gene 10, gene 11, gene 12, gene 13, gene 14, gene 15, gene 17, gene 18, gene 19, gene 38, gene 39, gene 46, gene 47, gene 48, gene 49, gene 50, gene 56, gene 57, gene 58, gene 59, gene 61, gene 63, gene 64, gene 65, gene 66, gene 67, gene 68, gene 69, gene 70.

[0149] When a gene in a viral genome is an essential gene, the virus cannot grow in the absence of the gene. Therefore, by deleting an arbitrary gene in a viral genome aid detecting the growth of the virus, it is possible to determine whether the gene is an essential gene or a non-essential gene.

[0150] As used herein, the term “wild strain” in relation to varicella-zoster virus refers to a varicella-zoster virus strain which is not artificially modified and is isolated from nature. An example of a wild strain includes, but is not limited to, Dumas strain identified by Davison, A. J. and Scott, J. E. (J. Gen. Virol. 67 (Pt 9), 1759-1816 (1986). The nucleic acid sequence of Dumas strain is set forth in SEQ ID NO.: 5. The number of each ORF and the site thereof in the Dumas strain are described below.

| | Reading frame | | Number of amino |
|---|---|---|---|
| ORF Name | direction | Site on genome | acid residues |
| ORF1 | 3′→5′ direction | 589 to 915 | amino acid 1-108 |
| ORF2 | 5′→3′ direction | 1134 to 1850 | amino acid 1-238 |
| ORF3 | 3′→5′ direction | 1908 to 2447 | amino acid 1-179 |
| ORF4 | 3′→5′ direction | 2783 to 4141 | amino acid 1-452 |
| ORF5 | 3′→5′ direction | 4252 to 5274 | amino acid 1-340 |
| ORF6 | 3′→5′ direction | 5326 to 8577 | amino acid 1-1083 |
| ORF7 | 5′→3′ direction | 8607 to 9386 | amino acid 1-259 |
| ORF8 | 3′→5′ direction | 9477 to 10667 | amino acid 1-396 |
| ORF9 | 5′→3′ direction | 11009 to 11917 | amino acid 1-302 |
| ORF9A | 5′→3′ direction | 10642 to 10902 | amino acid 1-87 |
| ORF10 | 5′→3′ direction | 12160 to 13392 | amino acid 1-410 |
| ORF11 | 5′→3′ direction | 13590 to 16049 | amino acid 1-819 |
| ORF12 | 5′→3′ direction | 16214 to 18199 | amino acid 1-661 |
| ORF13 | 5′→3′ direction | 18441 to 19346 | amino acid 1-301 |
| ORF14 | 3′→5′ direction | 19431 to 21113 | amino acid 1-560 |
| ORF15 | 3′→5′ direction | 21258 to 22478 | amino acid 1-406 |
| ORF16 | 3′→5′ direction | 22568 to 23794 | amino acid 1-408 |
| ORF17 | 5′→3′ direction | 24149 to 25516 | amino acid 1-455 |
| ORF18 | 3′→5′ direction | 25573 to 26493 | amino acid 1-306 |
| ORF19 | 3′→5′ direction | 26518 to 28845 | amino acid 1-775 |
| ORF20 | 3′→5′ direction | 29024 to 30475 | amino acid 1-483 |
| ORF21 | 5′→3′ direction | 30759 to 33875 | amino acid 1-1038 |
| ORF22 | 5′→3′ direction | 34083 to 42374 | amino acid 1-2763 |
| ORF23 | 3′→5′ direction | 42431 to 43138 | amino acid 1-235 |
| ORF24 | 3′→5′ direction | 43212 to 44021 | amino acid 1-269 |
| ORF25 | 3′→5′ direction | 44148 to 44618 | amino acid 1-156 |
| ORF26 | 5′→3′ direction | 44506 to 46263 | amino acid 1-585 |
| ORF27 | 5′→3′ direction | 46127 to 47128 | amino acid 1-333 |
| ORF28 | 3′→5′ direction | 47052 to 50636 | amino acid 1-1194 |
| ORF29 | 5′→3′ direction | 50857 to 54471 | amino acid 1-1204 |
| ORF30 | 5′→3′ direction | 54651 to 56963 | amino acid 1-770 |
| ORF31 | 5′→3′ direction | 57008 to 59614 | amino acid 1-868 |
| ORF32 | 5′→3′ direction | 59766 to 60197 | amino acid 1-143 |
| ORF33 | 3′→5′ direction | 60321 to 62138 | amino acid 1-605 |
| ORF33.5 | 3′→5′ direction | 60321 to 61229 | amino acid 1-301 |
| ORF34 | 3′→5′ direction | 62171 to 63910 | amino acid 1-579 |
| ORF35 | 3′→5′ direction | 63977 to 64753 | amino acid 1-258 |
| ORF36 | 5′→3′ direction | 64807 to 65832 | amino acid 1-341 |
| ORF37 | 5′→3′ direction | 66074 to 68599 | amino acid 1-841 |
| ORF38 | 3′→5′ direction | 68668 to 70293 | amino acid 1-541 |
| ORF39 | 5′→3′ direction | 70633 to 71355 | amino acid 1-240 |
| ORF40 | 5′→3′ direction | 71540 to 75730 | amino acid 1-1396 |
| ORF41 | 5′→3′ direction | 75847 to 76797 | amino acid 1-316 |
| ORF42 + 45 | 3′→5′ direction | 76851 to 78038 | amino acid 1-747 |
| | | and | |
| | | 81538 to 82593 | |
| ORF43 | 5′→3′ direction | 78170 to 80200 | amino acid 1-676 |
| ORF44 | 5′→3′ direction | 80360 to 81451 | amino acid 1-363 |
| ORF46 | 5′→3′ direction | 82719 to 83318 | amino acid 1-199 |
| ORF47 | 5′→3′ direction | 83168 to 84700 | amino acid 1-510 |
| ORF48 | 5′→3′ direction | 84667 to 86322 | amino acid 1-551 |
| ORF49 | 5′→3′ direction | 86226 to 86471 | amino acid 1-81 |
| ORF50 | 3′→5′ direction | 86575 to 87882 | amino acid 1-435 |
| ORF51 | 5′→3′ direction | 87881 to 90388 | amino acid 1-835 |
| ORF52 | 5′→3′ direction | 90493 to 92808 | amino acid 1-771 |
| ORF53 | 3′→5′ direction | 92855 to 93850 | amino acid 1-331 |
| ORF54 | 3′→5′ direction | 93675 to 95984 | amino acid 1-769 |
| ORF55 | 5′→3′ direction | 95996 to 98641 | amino acid 1-881 |
| ORF56 | 5′→3′ direction | 98568 to 99302 | amino acid 1-244 |
| ORF57 | 3′→5′ direction | 99411 to 99626 | amino acid 1-71 |
| ORF58 | 3′→5′ direction | 99607 to 100272 | amino acid 1-221 |
| ORF59 | 3′→5′ direction | 100302 to 101219 | amino acid 1-305 |
| ORF60 | 3′→5′ direction | 101170 to 101649 | amino acid 1-159 |
| ORF61 | 3′→5′ direction | 103082 to 104485 | amino acid 1-467 |
| ORF62 | 3′→5′ direction | 105201 to 109133 | amino acid 1-1310 |
| ORF63 | 5′→3′ direction | 110581 to 111417 | amino acid 1-278 |
| ORF64 | 5′→3′ direction | 111565 to 112107 | amino acid 1-180 |
| ORF65 | 3′→5′ direction | 112332 to 112640 | amino acid 1-102 |
| ORF66 | 5′→3′ direction | 113037 to 114218 | amino acid 1-393 |
| ORF67 | 5′→3′ direction | 114496 to 115560 | amino acid 1-354 |
| ORF68 | 5′→3′ direction | 115808 to 117679 | amino acid 1-623 |
| ORF69 | 3′→5′ direction | 117790 to 118332 | amino acid 1-180 |
| ORF70 | 3′→5′ direction | 118480 to 119316 | amino acid 1-278 |
| ORF71 | 5→3′ direction | 120764 to 124696 | amino acid 1-1310 |

[0151] In the above-described table, “5′→3′ direction” indicates that the ORF has the same direction as that of the nucleic acid sequence of SEQ ID NO.: 5. “3′→5′ direction” indicates that the ORF has a reverse direction with respect to that of the nucleic acid sequence of SEQ ID NO.: 5. By identifying a sequence homologous to the nucleic acid sequence and/or the amino acid sequence of the ORF, those skilled in the art can easily identify the ORF in the genome of a strain other than Dumas strain.

[0152] As used herein, the term “mutant strain” refers to a varicella-zoster virus strain which has a mutation due to mutagenesis, multiple subculturings or the like. Mutagenesis of a varicella-zoster virus train may be either random mutagenesis or site-specific mutagenesis.

[0153] The terms “attenuated virus” as used herein is a type of a virus mutant strain and refer to the one that has lower virulence than wild strain. Two methods for deciding whether the virulence of a virus mutant strain is lower than that of wild strain or not (that is, the method for examining the pathogenicity of varicella-zoster virus) have been established.

[0154] As a method using an animal model, the method for evaluating the pathogenicity by producing a severe combined immunodeficient (SCID) mouse to which human skin is transplanted, and then, to infect the mouse with varicella-zoster virus is well-known (J. Virol. February 1998; 72(2): 965-74,).

[0155] On the other hand, as a method for evaluating the pathogenicity in vitro, the method for observing CPE (cytopathic effect) of melanoma after culturing for 7-8 days where a monolayer culture human melanoma is inserted to the lower layer and a cord-blood mononuclear cell (CBMC) which is infected with varicella-zoster cell virus is inserted to the upper layer of a two-layer well separated by a trans-well of pore size 3 μm, is also well-known (J. Virol. February 2000; 74(4): 1864-70).

[0156] Although it is not the method for the pathogenicity directly from the study of the present inventors (J Virol. November 2002; 75(22): 11447-59), which is understood to indicate that there are close relationships between the pathogenicity and the proliferation of a virus, it is also possible to evaluate the pathogenicity indirectly by examining the proliferation of cell-to-cell employing the infectious center assay.

[0157] The method for attenuating a virus artificially is well known. For example, a varicella-zoster virus comprises at least the base substitutions of the following (a)-(d) in the gene 62 in SEQ ID NO.5:
[0158] (a) base substitution at position 2110 for G;
[0159] (b) base substitution at position 3100 for G;
[0160] (c) base substitution at position 3818 for C; and
[0161] (d) base substitution at position 4006 for G,
[0162] and comprises at least a base substitution at position 5745 for G, in the gene 6 in SEQ ID NO. 8 is available as an attenuated virus.

[0163] In addition to the base substitutions of (a)-(d), instead of employing the above-mentioned varicella-zoster virus, an attenuated varicella virus which comprises at least one or more base substitutions of following (e)-(g):
[0164] (e) base substitution at position 1251 for G;
[0165] (f) base substitution at position 2226 for G; and
[0166] (g) base substitution at position 3657 for G, is available.

[0167] In addition to one or more base substitutions of (a)-(g), instead of employing the above-mentioned varicella-zoster virus, an attenuated varicella virus which comprises at least one or more base substitutions of the following (h)-(o):
[0168] (h) base substitution at position 162 for C;
[0169] (i) base substitution at position 225 for C;
[0170] (j) base substitution at position 523 for C;
[0171] (k) base substitution at position 1565 for C;
[0172] (l) base substitution at position 1763 for C;
[0173] (m) base substitution at position 2652 for C;
[0174] (n) base substitution at position 4052 for C; and
[0175] (o) base substitution at position 4193 for C, is available.

[0176] Alternatively, as an “attenuated virus”, a virus which comprises at least one or more base substitutions selected from the following group in the gene 62:
[0177] (a) base substitution at position 2110 for G;
[0178] (b) base substitution at position 3100 for G;
[0179] (c) base substitution at position 3818 for C;
[0180] (d) base substitution at position 4006 for G;
[0181] (e) base substitution at position 1251 for G;
[0182] (f) base substitution at position 2226 for G;
[0183] (g) base substitution at position 3657 for G;
[0184] (h) base substitution at position 162 for C;
[0185] (i) base substitution at position 225 for C;
[0186] (j) base substitution at position 523 for C;
[0187] (k) base substitution at position 1565 for C;
[0188] (l) base substitution at position 1763 for C;
[0189] (m) base substitution at position 2652 for C;
[0190] (n) base substitution at position 4052 for C; and
[0191] (o) base substitution at position 4193 for C, can be employed.

[0192] The terms “protein”, “polypeptide”, “oligopeptide” and “peptide” as used herein have the same meaning and refer to an amino acid polymer having any length.

[0193] The terms “polynucleotide”, “oligonucleotide”, and “nucleic acid” as used herein have the same meaning and refer to a nucleotide polymer having any length. Unless otherwise indicated, a particular nucleic acid sequence also implicitly encompasses conservatively-modified variants thereof (e.g. degenerate codon substitutions) and complementary sequences as well as the sequence explicitly indicated. Specifically, degenerate codon substitutions maybe produced by generating sequences in which the third position of one or more selected (or all) codons is substituted with mixed-base and/or deoxyinosine residues (Batzer et al., Nucleic Acid Res. 19:5081 (1991); Ohtsuka et al., J. Biol. Chem. 260:2605-2608 (1985); Rossolini et al., Mol. Cell. Probes 8:91-98 (1994)).

[0194] As used herein, the term “gene” refers to an element defining a genetic trait. A gene is typically arranged in a given sequence on a chromosome. A gene which defines the primary structure of a protein is called a structural gene. A gene which regulates the expression of a structural gene is called a regulatory gene. As used herein, “gene” may refer to “polynucleotide”, “oligonucleotide”, “nucleic acid”, and “nucleic acid molecule” and/or “protein”, “polypeptide”, “oligopeptide” and “peptide”. As used herein, the term “open reading frame” or “ORF” in relation to a gene, refers to a reading frame which is one of three frames obtained by sectioning the base sequence of a gene at intervals of three bases, and has a start codon and a certain length without a stop codon appearing partway, and has the possibility of actually coding a protein. The entire base sequence of the genome of varicella-zoster virus has been determined, identifying at least 71 genes. Each of the genes is known to have an open reading frame (ORF).

[0195] As used herein, the term “region within an ORF” in relation to a gene in a varicella-zoster virus genome, refers to a region in which there are bases constituting the ORF in the gene within the varicella-zoster virus genome.

[0196] As used herein, the term “region flanking an ORF” in relation to a gene in a varicella-zoster virus genome, refers to a region in which there are bases existing in the vicinity of the ORF in the gene within the varicella-zoster virus genome, and which does not correspond to a region within the ORF of the gene or other genes.

[0197] As used herein, the term “homology” of a gene refers to the proportion of identity between two or more gene sequences. Therefore, the greater the homology between two given genes, the greater the identity or similarity between their sequences. Whether or not two genes have homology is determined by comparing their sequences directly or by a hybridization method under stringent conditions. When two gene sequences are directly compared with each other, these genes have homology if the DNA sequences of the genes have representatively at least 50% identity, preferably at least 70% identity, more preferably at least 80%, 90%, 95%, 96%, 97%, 98%, or 99% identity with each other.

[0198] Similarity comparison and homology calculation of base sequences are herein performed using BLAST (sequence analyzing tool) with the default parameters.

[0199] As used herein, the term “expression” of a gene, a polynucleotide, a polypeptide, or the like, indicates that the gene or the like is affected by a predetermined action in vivo to be changed into another form. Preferably, the term “expression” indicates that genes, polynucleotides, or the like are transcribed and translated into polypeptides. In one embodiment of the present invention, genes may be transcribed into mRNA. More preferably, these polypeptides may have post-translational processing modifications.

[0200] Amino acids may be referred to herein by either their commonly known three letter symbols or by the one-letter symbols recommended by the IUPAC-IUB Biochemical Nomenclature Commission. Nucleotides, likewise, may be referred to by their commonly accepted single-letter codes.

[0201] As used herein, the term “fragment” refers to a polypeptide or polynucleotide having a sequence length ranging from 1 to n-1 with respect to the full length of the reference polypeptide or polynucleotide (of length n). The length of the fragment can be appropriately changed depending on the purpose. For example, in the case of polypeptides, the lower limit of the length of the fragment includes 3, 4, 5, 6, 7, 8, 9, 10, 15, 20, 25, 30, 40, 50 or more nucleotides. Lengths represented by integers which are not herein specified (e.g., 11 and the like) may be appropriate as a lower limit. For example, in the case of polynucleotides, the lower limit of the length of the fragment includes 5, 6, 7, 8, 9, 10, 15, 20, 25, 30, 40, 50, 75, 100, 200, 300, 400, 500, 600, 600, 700, 800, 900, 1000 or more nucleotides. Lengths represented by integers which are not herein specified (e.g., 11 and the like) may be appropriate as a lower limit.

[0202] A polypeptide encoded by a gene in a BAC vector may have at least one (e.g., one or several) amino acid substitution, addition, and/or deletion or at least one sugar chain substitution, addition, and/or deletion as long as they have substantially the same function as that of a corresponding naturally-occurring polypeptide.

[0203] As used herein, the term “sugar chain” refers to a compound which is made up of a series of at least one sugar unit (a monosaccharide and/or its derivative). When two or more sugars unit is linked, the sugars unit are joined by dehydrocondensation due to glycosidic bonds. Examples of such a sugar chain include, but are not limited to, polysaccharides contained in organisms (glucose, galactose, mannose, fucose, xylose, N-acetylglucosamine, N-acetylgalactosamine, sialic acid, and complexes and derivates thereof), and degraded polysaccharides, sugar chains degraded or induced from complex biological molecules (e.g., glycoproteins, proteoglycan, glycosaminoglycan, glycolipids, etc.), and the like. Therefore, the term “sugar chain” may be herein used interchangeably with “polysaccharide”, “carbohydrate”, and “hydrocarbon”. Unless otherwise specified, the term “sugar chain” as used herein includes both a sugar chain and a sugar chain-containing substance.

[0204] It is well known that if a given amino acid is substituted with another amino acid having a similar hydrophobicity index, the resultant protein may still have a biological function similar to that of the original protein (e.g., a protein having an equivalent enzymatic activity). For such an amino acid substitution, the hydrophobicity index is preferably within ±2, more preferably within ±1, and even more preferably within ±0.5. It is understood in the art that such an amino acid substitution based on hydrophobicity is efficient. A hydrophilicity index is also useful for modification of an amino acid sequence of the present invention. As described in U.S. Pat. No. 4,554,101, amino acid residues are given the following hydrophilicity indices: arginine (+3.0); lysine (+3.0); aspartic acid (+3.0±1); glutamic acid (+3.0±1); serine (+0.3); asparagine (+0.2); glutamine (+0.2); glycine (0); threonine (−0.4); proline (−0.5±1); alanine (−0.5); histidine (−0.5); cysteine (−1.0); methionine (−1.3); valine (−1.5); leucine (−1.8); isoleucine (−1.8); tyrosine (−2.3); phenylalanine (−2.5); and tryptophan (−3.4). It is understood that an amino acid may be substituted with another amino acid which has a similar hydrophilicity index and can still provide a biological equivalent. For such an amino acid substitution, the hydrophilicity index is preferably within ±2, more preferably ±1, and even more preferably ±0.5.

[0205] The term “conservative substitution” as used herein refers to amino acid substitution in which a substituted amino acid and a substituting amino acid have similar hydrophilicity indices or/and hydrophobicity indices. For example, conservative substitution is carried out between amino acids having a hydrophilicity or hydrophobicity index of within ±2, preferably within ±1, and more preferably within ±0.5. Examples of conservative substitution include, but are not limited to, substitutions within each of the following residue pairs: arginine and lysine; glutamic acid and aspartic acid; serine and threonine; glutamine and asparagine; and valine, leucine, and isoleucine, which are well known to those skilled in the art.

[0206] As used herein, the term “variant” refers to a substance, such as a polypeptide, polynucleotide, or the like, which differs partially from the original substance. Examples of such a variant include a substitution variant, an addition variant, a deletion variant, a truncated variant, an allelic variant, and the like. Examples of such a variant include, but are not limited to, a nucleotide or polypeptide having one or several substitutions, additions and/or deletions or a nucleotide or polypeptide having at least one substitution, addition and/or deletion. The term “allele” as used herein refers to a genetic variant located at a locus identical to a corresponding gene, where the two genes are distinguished from each other. Therefore, the term “allelic variant” as used herein refers to a variant which has an allelic relationship with a given gene. Such an allelic variant ordinarily has a sequence the same as or highly similar to that of the corresponding allele, and ordinarily has almost the same biological activity, though it rarely has different biological activity. The term “species homolog” or “homolog” as used herein refers to one that has an amino acid or nucleotide homology with a given gene in a given species (preferably at least 60% homology, more preferably at least 80%, at least 85%, at least 90%, and at least 95% homology). A method for obtaining such a species homolog is clearly understood from the description of the present specification. The term “ortholog” (also called orthologous genes) refers to genes in different species derived from a common ancestry (due to speciation). For sample, in the case of the hemoglobin gene family having multigene structure, human and mouse a-hemoglobin genes are orthologs, while the human α-hemoglobin gene and the human β-hemoglobin gene are paralogs (genes arising from gene duplication). Orthologs are useful for estimation of molecular phylogenetic trees. Usually, orthologs in different species may have a function similar to that of the original species. Therefore, orthologs of the present invention may be useful in the present invention.

[0207] As used herein, the term “conservative (or conservatively modified) variant” applies to both amino acid and nucleic acid sequences. With respect to particular nucleic acid sequences, conservatively modified variants refer to those nucleic acids which encode identical or essentially identical amino acid sequences. Because of the degeneracy of the genetic code, a large number of functionally identical nucleic acids encode any given protein. For example, the codons GCA, GCC, GCG and GCU all encode the amino acid alanine. Thus, at every position where an alanine is specified by a codon, the codon can be altered to any of the corresponding codons described without altering the encoded polypeptide. Such nucleic acid variations are “silent variations” which represent one species of conservatively modified variation. Every nucleic acid sequence herein which encodes a polypeptide also describes every possible silent variation of the nucleic acid. Those skilled in the art will recognize that each codon in a nucleic acid (except AUG, which is ordinarily the only codon for methionine, and TGG, which is ordinarily the only codon for tryptophan) can be modified to yield a functionally identical molecule. Accordingly, each silent variation of a nucleic acid which encodes a polypeptide is implicit in each described sequence. Preferably, such modification may be performed while avoiding substitution of cysteine which is an amino acid capable of largely affecting the higher-order structure of a polypeptide.

[0208] In order to prepare a BAC vector containing a gene encoding a functionally equivalent polypeptide, amino acid additions, deletions, or modifications can be performed in addition to amino acid substitutions. Amino acid substitution(s) refers to the replacement of at least one amino acid of an original peptide chain with different amino acids, such as the replacement of 1 to 10 amino acids, preferably 1 to 5 amino acids, and more preferably 1 to 3 amino acids with different amino acids. Amino acid addition(s) refers to the addition of at least one amino acid to an original peptide chain, such as the addition of 1 to 10 amino acids, preferably 1 to 5 amino acids, and more preferably 1 to 3 amino acids to an original peptide chain. Amino acid deletion(s) refers to the deletion of at least one amino acid, such as the deletion of 1 to 10 amino acids, preferably 1 to 5 amino acids, and more preferably 1 to 3 amino acids. Amino acid modification includes, but are not limited to, amidation, carboxylation, sulfation, halogenation, truncation, lipidation, alkylation, glycosylation, phosphorylation, hydroxylation, acylation (e.g., acetylation), and the like. Amino acids to be substituted or added may be naturally-occurring or nonnaturally-occurring amino acids, or amino acid analogs. Naturally-occurring amino acids are preferable.

[0209] As used herein, a nucleic acid form of a polypeptide refers to a nucleic acid molecule capable of expressing a protein form of the polypeptide. This nucleic acid molecule may have a nucleic acid sequence, a part of which is deleted or substituted with another base, or alternatively, into which another nucleic acid sequence is inserted, as long as an expressed polypeptide has substantially the same activity as that of a naturally occurring polypeptide. Alternatively, another nucleic acid may be linked to the 5′ end and/or the 3′ end of the nucleic acid molecule. The nucleic acid molecule may be a nucleic acid molecule which is hybridizable to a gene encoding a polypeptide under stringent conditions and encodes a polypeptide having substantially the same function as that polypeptide. Such a gene is known in the art and is available in the present invention.

[0210] Such a nucleic acid can be obtained by a well known PCR technique, or alternatively, can be chemically synthesized. These methods may be combined with, for example, site-specific mutagenesis, hybridization, or the like.

[0211] As used herein, the term “substitution, addition or deletion” for a polypeptide or a polynucleotide refers to the substitution, addition or deletion of an amino acid or its substitute, or a nucleotide or its substitute, with respect to the original polypeptide or polynucleotide, respectively. This is achieved by techniques well-known in the art, including a site-specific mutagenesis technique, and the like. A polypeptide or a polynucleotide may have any number (>0) of substitutions, additions, or deletions. The number can be as large as a variant having such a number of substitutions, additions or deletions which maintains an intended function. For example, such a number may be one or several, and preferably within 20% or 10% of the full length, or no more than 100, no more than 50, no more than 25, or the like.

[0212] The structure of polymers (e.g., polypeptide structure) may be described at various levels. This structure is generally described in, for example, Alberts et al., Molecular Biology of the Cell (3rd Ed., 1994), and Cantor and Schimmel, Biophysical Chemistry Part I: The Conformation of Biological Macromolecules (1980). General molecular biological techniques available in the present invention can be easily carried out by the those skilled in the art by referencing Ausubel F. A. et al. eds. (1988), Current Protocols in Molecular Biology, Wiley, New York, N.Y.; Sambrook J. et al., (1987) Molecular Cloning: A Laboratory Manual, 2nd Ed., Cold Spring Harbor Laboratory Press, Cold Spring Harbor, N.Y., or the like.

[0213] When mentioning ones in the present specification, “vector” refers to an agent which can transfer a polynucleotide sequence of interest to a target cell. Examples of such a vector include vectors which are capable of self replication or capable of being incorporated into a chromosome within host cells (e.g., prokaryotic cells, yeast, animal cells, plant cells, insect cells, whole animals, and whole plants), and contain a promoter at a site suitable for transcription of a polynucleotide of the present invention.

[0214] The term “BAC vector” refers to a plasmid which is produced using F plasmid of E. coli and a vector which can stably maintain and grow a large size DNA fragment of about 300 kb or more in bacteria, such as E. coli and the like. The BAC vector contains at least a region essential for the replication of the BAC vector. Examples of such a region essential for replication include, but are not limited to, the replication origin of F plasmid (oriS) and variants thereof.

[0215] As used herein, the term “BAC vector sequence” refers to a sequence comprising a sequence essential for the function of a BAC vector. Optionally, the BAC vector sequence may further comprise a “recombinant protein-dependent recombinant sequence” and/or a “selectable marker”.

[0216] As used herein, the term “recombinant” in relation to nucleic acid is used interchangeably with the term “homologous recombination”, and indicates that two different homologous nucleic acid molecules encounter each other, crossover occurs, and a new combination of nucleic acid is generated. As used herein, homologous recombination includes both “recombinant protein-dependent recombination” and “recombinant protein-independent recombination”. The term “recombinant protein-dependent recombination” refers to homologous recombination which occurs in the presence of a recombinant protein, but not in the absence of a recombinant protein. The term “recombinant protein-independent recombination” refers to homologous recombination which occurs irrespective of the presence or absence of a recombinant protein. As used herein, the term “recombinant protein-dependent recombinant sequence” refers to a sequence which causes recombinant protein-dependent recombination. The term “recombinant protein-independent recombinant sequence” refers to a sequence which causes recombinant protein-independent recombination. The recombinant protein-dependent recombinant sequence causes recombination in the presence of a recombinant protein, but not in the absence of a recombinant protein. A recombinant protein preferably acts specifically on a recombinant protein-dependent recombinant sequence, and does not act on sequences other than the recombinant protein-dependent recombinant sequence.

[0217] Examples of representative pairs of a recombinant protein-dependent recombinant sequence and a recombinant protein include, but are not limited to: a combination of a bacteriophage P1-derived loxp (locus of crossover of P1) sequence and a Cre (cyclization recombination) protein, a combination of Flp protein and FRT site, a combination of φC31 and attB or attP (Thorpe, Helena M.; Wilson, Stuart E.; Smith, Margaret C. M., Control of directionality in the site-specific recombination system of the Streptomyces phage φC31., Molecular Microbiology (2000), 38(2), 232-241.), a combination of resolvase and res site (Sadowski P., Site-specific recombinases: changing partners and doing the twist, J. Bacteriol., February 1986; 165(2) 341-7) (generally, Sauer B., Site-specific recombination: developments and applications., Curr. Opin. Biotechnol., October 1994; 5(5): 521-7).

[0218] As used herein, the term “selectable marker” refers to a gene which functions as an index for selection of a host cell containing a BAC vector. Examples of a selectable marker include, hit are not limited to, fluorescent markers, luminiscent markers, and drug selectable markers. An example of a “fluorescent marker” is, but is not limited to, a gene encoding a fluorescent protein, such as a green fluorescent protein (GFP). An example of a “luminiscent marker” is, but is not limited to, a gene encoding a luminescent protein, such as luciferase. An example of a “drug selectable marker” is, but is not limited to, a gene encoding a protein selected from the group consisting of: dihydrofolate reductase gene, glutamine synthase gene, aspartic acid transaminase, metallothionein (MT), adenosine deaminase (ADA), adenosine deaminase (AMPD1, 2), xanthine-guanine-phosphoribosyl transferase, UMP synthase, P-glycoprotein, asparagine synthase, and ornithine decarboxylase. Examples of a combination of a drug selectable marker and a drug include: a combination of dihydrofolate reductase gene (DHFR) aid methotrexate (MTX), a combination of gutamine synthase (GS) gene and methionine sulfoximine (Msx), a combination of aspartic acid transaminase (CAD) gene and N-phosphonacetyl-L-aspartate) (PALA), a combination of MT gene and cadmium (Cd2⁺), a combination of adenosine deaminase (ADA) gene and adenosine, alanosine, or 2′-deoxycoformycin, a combination of adenosine deaminase (AMPD1, 2) gene and adenine, azaserine, or coformycin, a combination of xanthine-guanine-phosphoribosyltransferase gene and mycophenolic acid, a combination of UMP synthase gene and 6-azaulysineorpyrazofuran, acombinationof P-glycoprotein (P-gp, MDR) gene and multiple drugs, a combination of asparagine synthase (AS) gene and β-aspartyl hydroxamic acid or albizziinn, and a combination of ornithine decarboxylase (ODC) gene and α-difluoromethyl-ornithine (DFMO).

[0219] As used herein, the term “expression vector” refers to a nucleic acid sequence comprising a structural gene and a promoter for regulating expression thereof, and in addition, various regulatory elements in a state that allows them to operate within host cells. The regulatory element may include, preferably, terminators, selectable markers such as drug-resistance genes (e.g., a kanamycin resistance gene, a hygromycin resistance gene, etc.), and enhancers. It is well known to those skilled in the art that the type of an organism (e.g., a plant) expression vector and the type of a regulatory element may vary depending on the host cell. In the case of plants, a plant expression vector for use in the present invention may further have a T-DNA region. A T-DNA region enhances the efficiency of gene transfer, especially when a plant is transformed using Agrobacterium.

[0220] As used herein, the term “recombinant vector” refers to a vector which can transfer a polynucleotide sequence of interest to a target cell. Examples of such a vector include vectors which are capable of self replication or capable of being incorporated into a chromosome within host cells (e.g., prokaryotic cells, yeast, animal cells, plant cells, insect cells, whole animals, and whole plants), and contain a promoter at a site suitable for transcription of a polynucleotide of the present invention.

[0221] As used herein, the term “terminator” refers to a sequence which is located downstream of a protein-encoding region of a gene and which is involved in the termination of transcription when DNA is transcribed into mRNA, and the addition of a poly A sequence. It is known that a terminator contributes to the stability of mRNA, and has an influence on the amount of gene expression. Examples of a terminator include, but are not limited to, terminators derived from mammals, the CaMV35S terminator, the terminator of the nopaline synthase gene (Tnos), the terminator of the tobacco PR1a gene, and the like.

[0222] As used herein, the term “promoter” refers to a base sequence which determines the initiation site of transcription of a gene and is the region in the ORF of DNA which directly regulates the frequency of transcription. Transcription is started by RNA polymerase binding to a promoter. A promoter region is usually located within about 2 kbp upstream of the first exon of a putative protein coding region. Therefore, it is possible to estimate a promoter region by predicting a protein coding region in a genomic base sequence using DNA analysis software. A putative promoter region is usually located upstream of a structural gene, but depending on the structural gene, i.e., a putative promoter region may be located downstream of a structural gene. Preferably, a putative promoter region is located within about 2 kbp upstream of the translation initiation site of the first exon.

[0223] As used herein, the term “constitutive” for expression of a promoter of the present invention refers to a character of the promoter that the promoter is expressed in a substantially constant amount in all tissues of an organism no matter whether the growth stage of the organism is a juvenile phase or a mature phase. Specifically, when Northern blotting analysis is performed under the same conditions as those described in examples of the present specification, expression is considered to be constitutive according to the definition of the present invention if substantially the same amount of expression is observed at the same or corresponding site at any time (e.g., two or more time points (e.g., day 5 and day 15)), for example. Constitutive promoters are considered to play a role in maintaining the homeostasis of organisms in a normal growth environment. These characters can be determined by extracting RNA from any portion of an organism and analyzing the expression amount of the RNA by Northern blotting or quantitating expressed proteins by Western blotting.

[0224] An “enhancer” may be used so as to enhance the expression efficiency of a gene of interest. When used in animals, an enhancer region containing an upstream sequence within the SV40 promoter is preferable. One or more enhancers may be used, or no enhancer may be used.

[0225] As used herein, the term “operatively linked” indicates that a desired sequence is located such that expression (operation) thereof is under control of a transcription and translation regulatory sequence (e.g., a promoter, an enhancer, and the like) or a translation regulatory sequence. In order for a promoter to be operatively linked to a gene, typically, the promoter is located immediately upstream of the one. A promoter is not necessarily adjacent to a structural gene.

[0226] As used herein, the terms “transformation”, “transduction” and “transfection” are used interchangeably unless otherwise mentioned, and refers to introduction of a nucleic acid into host cells. As a transformation method, any technique for introducing DNA into host cells can be used, including various well-known techniques, such as, for example, the electroporation method, the particle gun method (gene gun), the calcium phosphate method, and the like.

[0227] As used herein, the term “transformant” refers to the whole or a part of an organism, such as a cell, which is produced by transformation. Examples of a transformant include prokaryotic cells, yeast, animal cells, plant cells, insect cells and the like. Transformants may be referred to as transformed cells, transformed tissue, transformed hosts, or the like, depending on the subject. As used herein, all of the forms are encompassed, however, a particular form may be specified in a particular context.

[0228] Examples of prokaryotic cells include prokaryotic cells of the genera Escherichia, Serratia, Bacillus, Brevibacterium, Corynebacterium, Microbacterium, Pseudomonas, and the like, e.g., Escherichia coli XL1-Blue, Escherichia coli XL2-Blue, Escherichia coli DH1, Escherichia coli MC1000, Escherichia coli KY3276, Escherichia coli W1485, Escherichia coli JM109, Escherichia coli HB101, Escherichia coli No. 49, Escherichia coli W3110, Escherichia coli NY49, Escherichia coli BL21(DE3), Escherichia coli BL21 (DE3)pLysS, Escherichia coli HMS174 (DE3), Escherichia coli HMS174(DE3)pLysS, Serratia ficaria, Serratia fonticola, Serratia liquefaciens, Serratia marcescens, Bacillus subtilis, Bacillus amyloliquefaciens, Brevibacterium ammmoniagenes, Brevibacterium immariophilum ATCC14068, Brevibacterium saccharolyticum ATCC14066, Corynebacterium glutamicum ATCC13032, Corynebacterium glutamicum ATCC14067, Corynebacterium glutamicum ATCC13869, Corynebacterium acetoacidophilum ATCC13870, Microbacterium ammoniaphilum ATCC15354, Pseudomonas sp.D-0110, and the like.

[0229] Examples of animal cells include human MRC-5 cells, human HEL cells, human WI-38 cells, mouse myeloma cells, rat myeloma cells, human myeloma cells, mouse hybridoma cells, CHO cells derived from chinese hamster, BHK cells, African green monkey kidney cells, human leukemia cells, HBT5637 (Japanese Laid-Open Publication No. 63-299), human colon cancer cell strains. Mouse myeloma cells include ps20, NSO, and the like. Rat myeloma cells include YB2/0, and the like. Human fetus kidney cells includes HEK293 (ATCC: CRL-1573), and the like. Human leukemia cells include BALL-1, and the like. African green monkey kidney cells include COS-1, COS-7, vero cell and the like. Human colon cancer cell strains include HCT-15, and the like.

[0230] The term “animal” is used herein in its broadest sense and refers to vertebrates and invertebrates (e.g., arthropods). Examples of animals include, but are not limited to, any of the class Mammalia, the class Aves, the class Reptilia, the class Amphibia, the class Pisces, the class Insecta, the class Vermes, and the like.

[0231] As used herein, the term “tissue” in relation to organisms refers to an aggregate of cells having substantially the same function. Therefore, a tissue may be a part of an organ. Organs usually have cells having the same function, aid may have coexisting cells hiving sightly different functions. Therefore, as used herein, tissues may have various kinds of cells as long as a certain property is shared by the cells.

[0232] As used herein, the term “organ” refers to a structure which has a single independent form and in which one or more tissues are associated together to perform a specific function. In plants, examples of organs include, but are not limited to, callus, root, stem, trunk, leaf, flower, seed, embryo bud, embryo, fruit, and the like. In animals, examples of organs include, but are not limited to, stomach, liver, intestine, pancreas, lung, airway, nose, heart, artery, vein, lymph node (lymphatic system), thymus, ovary, eye, ear, tongue, skin, and the like.

[0233] As used herein, the term “transgenic” refers to incorporation of a specific gene into an organism (e.g., plants or animals (mice, etc.)) or such an organism having an incorporated gene.

[0234] When organisms of the present invention are animals, the transgenic organisms an be produced by a microinjection method (a trace amount injection method), a viral vector method, an embryonic stem (ES) cell method, a sperm vector method, a chromosome fragment introducing method (transsomic method), an episome method, or the like. These transgenic animal producing techniques are well known in the art.

[0235] As used herein, the term “screening” refers to selection of a substance, a host cell, a virus, or the like having a given specific property of interest from a number of candidates using a specific operation/evaluation method. It will be understood that the present invention encompasses viruses having desired activity obtained by screening.

[0236] As used herein, the terms “chip” or “microchip” are used interchangeably to refer to a micro integrated circuit which has versatile functions and constitutes a portion of a system. Examples of a chip include, but are not limited to, DNA chips, protein chips, and the like.

[0237] As used herein, the term “array” refers to a substrate (e.g., a chip, etc.) which has a pattern of a composition containing at least one (e.g., 1000 or more, etc.) target substances (e.g., DNA, proteins, cells, etc.), which are arrayed. Among arrays, patterned substrates having a small size (e.g., 10×10 mm, etc.) are particularly referred to as microarrays. The terms “microarray” and “array” are used interchangeably. Therefore, a patterned substrate having a larger size than that which is described above may be referred to as a microarray. For example, an array comprises a set of desired transfection mixtures fixed to a solid phase surface or a film thereof. An array preferably comprises at least 10² antibodies of the same or different types, more preferably at least 10³, even more preferably at least 10⁴, and still even more preferably at least 10⁵. These antibodies are placed on a surface of up to 125×80 mm, more preferably 10×10 mm. An array includes, but is not limited to, a 96-well microtiter plate, a 384-well microtiter plate, a microtiter plate the size of a glass slide, and the like. A composition to be fixed may contain one or a plurality of types of target substances. Such a number of target substance types may be in the range of from one to the number of spots, including, without limitation, about 10, about 100, about 500, and about 1,000.

[0238] As described above, any number of target substances (e.g., biomolecular, such as cells) may be provided on a solid phase surface or film, typically including no more than 10⁸ biological molecules per substrate, in another embodiment no more than 10⁷ biological molecules, no more than 10⁶ biological molecules, no more than 10⁵ biological molecules, no more than 10⁴ biological molecules, no more than 10³ biological molecules, or more than 10² biological molecules. A composition containing more than 10⁸ biological molecule target substances may be provided on a substrate. In these cases, the size of a substrate is preferably small. Particularly, the size of a spot of a composition containing target substances (e.g., such as cells) may be as small as the size of a single biological molecule (e.g., 1 to 2 nm order). In some cases, the minimum area of a substrate may be determined based on the number of biological molecules on a substrate.

[0239] “Spots” of biological molecules may be provided on an array. As used herein, the term “spot” refers to a certain set of compositions containing target substances. As used herein, the term “spotting” refers to an act of preparing a spot of a composition containing a certain target substance on a substrate or plate. Spotting may be performed by any method, for example, pipetting or the like, or alternatively, using an automatic device. These methods are well known in the art.

[0240] As used herein, the term “address” refers to a unique position on a substrate, which may be distinguished from other unique positions. Addresses are appropriately associated with spots. Addresses can have any distinguishable shape such that substances at each address maybe distinguished from substances at other addresses (e.g., optically). A shape defining an address maybe, for example, without limitation, a circle, an ellipse, a square, a rectangle, or an irregular shape. Therefore, the term “address” is used to indicate an abstract concept, while the term “spot” is used to indicate a specific concept. Unless it is necessary to distinguish them from each other, the terms “address” and “spot” may be herein used interchangeably.

[0241] The size of each address particularly depends on the size of the substrate, the number of addresses on the substrate, the amount of a composition containing target substances and/or available reagents, the size of microparticles, and the level of resolution required for any method used for the array. The size of each address may be, for example, in the range of from 1-2 nm to several centimeters, though the address may have any size suited to an array.

[0242] The spatial arrangement and shape which define an address are designed so that the microarray is suited to a particular application. Addresses may be densely arranged or sparsely distributed, or subgrouped into a desired pattern appropriate for a particular type of material to be analyzed.

[0243] As used herein, the term “support” refers to a material which can carry cells, bacteria, viruses, polynucleotides, or polypeptides. Such a support may be made from any solid material which has a capability of binding to a biological molecule as used herein via covalent or noncovalent bond, or which may be induced to have such a capability.

[0244] Examples of materials used for supports include any material capable of forming a solid surface, such as, without limitation, glass, silica, silicon, ceramics, silicon dioxide, plastics, metals (including alloys), naturally-occurring and synthetic polymers (e.g., polystyrene, cellulose, chitosan, dextran, and nylon), and the like. Preferably, a support comprises a portion for producing hydrophobic bonds. A support may be formed of layers made of a plurality of materials. For example, a support may be made of an inorganic insulating material, such as glass, quartz glass, alumina, sapphire, forsterite, silicon carbide, silicon oxide, silicon nitride, or the like. A support may be made of an organic material, such as polyethylene, ethylene, polypropylene, polyisobutylene, polyethylene terephthalate, unsaturated polyester, fluorine-containing resin, polyvinyl chloride, polyvinylidene chloride, polyvinyl acetate, polyvinyl alcohol, polyvinyl acetal, acrylic resin, polyacrylonitrile, polystyrene, acetal resin, polycarbonate, polyamide, phenol resin, urea resin, epoxy resin, melamine resin, styrene-acrylonitrile copolymer, acrylonitrile-butadiene-styrene copolymer, silicone resin, polyphenylene oxide, polysulfone, and the like. Alternatively, nitrocellulose film, nylon film, PVDF film, or the like, which are used in blotting, may be used as a material for a support.

[0245] The varicella-zoster virus of the present invention can be used as an ingredient of a pharmaceutical composition for the treatment, prevention, and/or therapy of infectious diseases.

[0246] As used herein, the term “effective amount” in relation to a drug refers to an amount which causes the drug to exhibit intended efficacy. As used herein, an effective amount corresponding to a smallest concentration may be referred to as a minimum effective amount. Such a minimum effective amount is well known in the art. Typically, the minimum effective amount of a drug has been determined or can be determined as appropriate by those skilled in the art. The determination of such an effective amount can be achieved by actual administration, use of an animal model, or the like. The present invention is also useful for the determination of such an effective amount.

[0247] As used herein, the term “pharmaceutically acceptable carrier” refers to a material which is used for production of a pharmaceutical agent or an agricultural chemical (e.g., an animal drug), and has no adverse effect on effective ingredients. Examples of such a pharmaceutically acceptable carrier include, but are not limited to: antioxidants, preservatives, colorants, flavoring agents, diluents, emulsifiers, suspending agents, solvents, fillers, bulking agents, buffers, delivery vehicles, excipients, and/or agricultural or pharmaceutical adjuvants.

[0248] The type and amount of a pharmaceutical agent used in the treatment method of the present invention can be easily determined by those skilled in the art based on information obtained by the method of the present invention (e.g., information relating to a disease) in view of the purpose of use, the target disease (type, severity, etc.), the subject's age, size, sex, and case history, the morphology and type of a site of a subject of administration, or the like. The frequency of subjecting a subject (patient) to the monitoring method of the present invention is also easily determined by those skilled in the art with respect to the purpose of use, the target disease (type, severity, etc.), the subject's age, size, sex, and case history, the progression of the therapy, and the like. Examples of the frequency of monitoring the state of a disease include once per day to once per several months (e.g., once per week to once per month). Preferably, monitoring is performed once per week to once per month with reference to the progression.

[0249] As used herein, the term “instructions” refers to a description of the method of the present invention for a person who performs administration, such as a medical doctor, a patient, or the like. Instructions state when to administer a medicament of the present invention, such as immediately after or before radiation therapy (e.g., within 24 hours, etc.). The instructions are prepared in accordance with a format defined by an authority of a country in which the present invention is practiced (e.g., Health, Labor and Welfare Ministry in Japan, Food and Drug Administration (FDA) in the U.S., and the like), explicitly describing that the instructions are approved by the authority. The instructions are so-called package insert and are typically provided in paper media. The instructions are not so limited and may be provided in the form of electronic media (e.g., web sites, electronic mails, and the like provided on the Internet).

[0250] In a therapy of the present invention, two or more pharmaceutical agents may be used as required. When two or more pharmaceutical agents are used, these agents may have similar properties or may be derived from similar origins, or alternatively, may have different properties or may be derived from different origins. A method of the present invention can be used to obtain information about the drug resistance level of a method of administering two or more pharmaceutical agents.

[0251] In the present invention, it will be appreciated by those skilled in the art that once the analysis result of a certain sugar chain structure has been correlated with a level of a disease concerning a similar type of organism, culture cell, tissue, animal (e.g., a mouse for a human) or the like, a corresponding sugar chain structure can be correlated with the disease level. Such matters are described and supported in, for example, “Doubutsu Baiyosaibo Manual (Animal Culture Cell Manual), Seno et al. eds., Kyoritsu shuppan, 1993, the entirety of which is hereby incorporated by reference.

### General Techniques Used Herein

[0252] Techniques used herein are within the technical scope of the present invention unless otherwise specified. These techniques are commonly used in the fields of sugar chain science, fluidics, micromachining, organic chemistry, biochemistry, genetic engineering, molecular biology, microbiology, genetics, and their relevant fields. The techniques are well described in documents described below and the documents mentioned herein elsewhere.

[0253] Micromachining is described in, for example, Campbell, S. A. (1996), The Science and Engineering of Microelectronic Fabrication, Oxford University Press; Zaut, P. V. (1996), Micromicroarray Fabrication: a Practical Guide to Semiconductor Processing, Semiconductor Services; Madou, M. J. (1997), Fundamentals of Microfabrication, CRC1 5 Press; Rai-Choudhury, P. (1997), Handbook of Microlithography, Micromachining & Microfabrication: Microlithography; and the like, the relevant portions of which are hereby incorporated by reference.

[0254] Molecular biology techniques, biochemistry techniques, and microbiology techniques used herein are well known and commonly used in the art, and are described in, for example, Maniatis, T. et al. (1989), Molecular Cloning: A Laboratory Manual, Cold Spring Harbor and its 3rd Ed. (2001); Ausubel, F. M. et al. eds, Current Protocols in Molecular Biology, John Wiley & Sons Inc., NY, 10158 (2000); Innis, M. A. (1990), PCR Protocols: A Guide to Methods and Applications, Academic Press; Innis, M. A. et al. (1995), PCR Strategies, Academic Press; Shinsky, J. J. et al. (1999), PCR Applications: Protocols for Functional Genomics, Academic Press; Gait, M. J. (1985), Oligonucleotide Synthesis: A Practical Approach, IRL Press; Gait, M. J. (1990), Oligonucleotide Synthesis: A Practical Approach, IRL Press; Eckstein, F. (1991), Oligonucleotides and Analogues: A Practical Approach, IRL Press; Adams, R. L. et al. (1992), The Biochemistry of the Nucleic Acids, Chapman & Hall; Shabarova, Z. et al. (1994), Advanced Organic Chemistry of Nucleic Acids, Weinheim; Blackburn, G. M. et al. (1996), Nucleic Acids in Chemistry and Biology, Oxford University Press; Hermanson, G. T. (1996), Bioconjugate Techniques, Academic Press; Method in Enzymology 230, 212, 217, Academic Press, 1994; Special issue, Jikken Igaku (Experimental Medicine) “Idenshi Donyu & Hatsugenkaiseki Jikkenho (Experimental Method for Gene introduction & Expression Analysis)”, Yodo-sha, 1997; and the like. Relevant portions (or possibly the entirety) of each of these publications are herein incorporated by reference.

### Description of Preferred Embodiments

[0255] Hereinafter, the present invention will be described by way of embodiments. Embodiments described below are provided only for illustrative purposes. Accordingly, the scope of the present invention is not limited by the embodiments except as by the appended claims. It will be clearly appreciated by those skilled in the art that variations and modifications can be made without departing from the scope of the present invention with reference to the specification.

[0256] According to an aspect of the present invention, recombinant varicella-zoster virus is provided. Preferably, the varicella-zoster virus contains a BAC vector sequence in its genome sequence. By constructing a varicella-zoster virus genome containing a BAC vector sequence, it becomes possible to handle the varicella-zoster virus genome as the BAC molecule in bacteria. A BAC vector sequence used herein preferably contains an origin of replication derived from F plasmid, or alternatively may contain any origin of replication other than an origin of replication derived from F plasmid, as long as it has a sequence of 300 kb or more and can be held and grown as a bacterial artificial sequence in bacterial cells. The BAC vector of the present invention can be maintained and/or grow in bacterial host cells, preferably E. coli cells. Preferably, a portion of the BAC vector is inserted into a non-essential region of a varicella-zoster virus genome, so that it is possible to manipulate it as a BAC containing the varicella-zoster virus genome. When the BAC containing the varicella-zoster virus genome is introduced into a mammalian cell, the recombinant varicella-zoster virus can be produced and grown. As a host cell for the recombinant varicella-zoster virus, any mammalian cell which can grow a wild-type varicella-zoster virus strain can be used. Preferably, such a host cell is derived from a human, including, for example, but being not limited to, human MRC-5 cell, human HEL cell, and human WI-38.

### Method for Producing a BAC Vector Containing a Human Varicella-Zoster Virus Genome

[0257] Various techniques can be used to produce a BAC vector containing a human varicella-zoster virus by using a human varicella-zoster virus genome and a BAC vector.

[0258] An example of the technique using homologous recombination is a technique using a nucleic acid having a linear BAC vector sequence linked with a sequence homologous to a human varicella-zoster virus genome.

[0259] A method for producing a BAC vector comprising a human varicella-zoster virus gnome by using a nucleic acid having a linear BAC vector sequence linked with a sequence homologous to a human varicella-zoster virus genome representatively comprises the steps of: (1) introducing the nucleic acid along with the human varicella-zoster virus genome into appropriate hosts (for example, into human established cell); (2) culturing the host cells to elicit homologous recombination between the homologous sequence linked with the linear BAC vector sequence and the human varicella-zoster virus genome sequence; (3) screening the host cells for one which contains the human varicella-zoster virus genome sequence having the BAC vector sequence incorporated due to the homologous recombination; (4) culturing the host cell and extracting a circular virus DNA.

[0260] Alternatively, in order to produce a BAC containing a human varicella-zoster virus genome using a human varicella-zoster virus genome and a BAC sequence, various methods, such as use of nucleic acid fragments obtained using restriction enzymes or the like, can be employed instead of homologous recombination.

[0261] A non-essential region of the varicella-zoster virus genome for introducing a BAC vector sequence thereinto selected from the group consisting of: the region in the ORF of gene 11, the region in the ORF of gene 12, the region in the ORF of gene 13, the region in the ORF of gene 14, the region in the ORF of gene 15, the region in the ORF of gene 17, the region in the ORF of gene 18, the region in the ORF of gene 19, the region in the ORF of gene 38, the region in the ORF of gene 39, the region in the ORF of gene 46, the region in the ORF of gene 47, the region in the ORF of gene 48, the region in the ORF of gene 49, the region in the ORF of gene 50, the region in the ORF of gene 56, the region in the ORF of gene 57, the region in the ORF of gene 58, the region in the ORF of gene 59, the region in the ORF of gene 61, the region in the ORF of gene 63, the region in the ORF of gene 64, the region in the ORF of gene 65, the region in the ORF of gene 66, the region in the ORF of gene 67, the region in the ORF of gene 68, the region in the ORF of gene 69, the region in the ORF of gene 70, the region flanking the ORF of gene 11, the region flanking the ORF of gene 12, the region flanking the ORF of gene 13, the region flanking the ORF of gene 14, the region flanking the ORF of gene 15, the region flanking the ORF of gene 17, the region flanking the ORF of gene 18, the region flanking the ORF of gene 19, the region flanking the ORF of gene 38, the region flanking the ORF of gene 39, the region flanking the ORF of gene 46, the region flanking the ORF of gene 47, the region flanking the ORF of gene 48, the region flanking the ORF of gene 49, the region flanking the ORF of gene 50, the region flanking the ORF of gene 56, the region flanking the ORF of gene 57, the region flanking the ORF of gene 58, the region flanking the ORF of gene 59, the region flanking the ORF of gene 61, the region flanking the ORF of gene 63, the region flanking the ORF of gene 64, the region flanking the ORF of gene 65, the region flanking the ORF of gene 66, the region flanking the ORF of gene 67, the region flanking the ORF of gene 68, the region flanking the ORF of gene 69, the region flanking the ORF of gene 70.

[0262] Preferably non-essential regions are regions flanking gene 11 or regions flanking gene 12. This is because gene 11 and gene 12 are contiguous non-essential genes on the varicella-zoster virus genome, so that it is easy to design a nucleic acid for homologous recombination. Alternatively, a part of a BAC vector sequence may be inserted to the region in the ORF of gene 62 of varicella-zoster virus genome.

[0263] A BAC vector sequence used in the present invention preferably includes a recombinant protein-dependent recombinant sequence and/or a selectable marker. Preferably, the selectable marker sequence is a drug selectable marker and/or a gene encoding a green fluorescent protein. This is because the presence of a desired gene can be easily confirmed.

[0264] Varicella-zoster virus employed as a starting material in the present invention may be from wild strain or mutated strain. Preferably, an attenuated virus, for example, varicella-zoster virus having mutation in Oka vaccine strain or the gene 62 is used as varicella-zoster virus as a starting material. As an “attenuated varicella-zoster virus”, a virus which comprises at least one of mutation of the gene 62, or more than one combination of mutation selected from the following group:
[0265] (a) base substitution at position 2110 for G;
[0266] (b) base substitution at position 3100 for G;
[0267] (c) base substitution at position 3818 for C;
[0268] (d) base substitution at position 4006 for G;
[0269] (e) base substitution at position 1251 for G;
[0270] (f) base substitution at position 2226 for G;
[0271] (g) base substitution at position 3657 for G;
[0272] (h) base substitution at position 162 for C;
[0273] (i) base substitution at position 225 for C;
[0274] (j) base substitution at position 523 for C;
[0275] (k) base substitution at position 1565 for C;
[0276] (l) base substitution at position 1763 for C;
[0277] (m) base substitution at position 2652 for C;
[0278] (n) base substitution at position 4052 for C; and
[0279] (o) base substitution at position 4193 for C, is included.

[0280] According to another aspect of the present invention, a vector used for production of the above-described virus and a method for producing the above-described virus are provided. According to still another aspect of the present invention, a pharmaceutical composition comprising the above-described virus and a pharmaceutical composition in the form of a vaccine are provided.

[0281] The recombinant luman varicella-zoster virus of the present invention can be used as a vaccine, since it has many proteins which have the same structure as that of wild virus.

[0282] According to still another aspect of the present invention, a method for introducing mutation into a vector for producing a vaccine of the present invention is provided. The method comprises the steps of: introducing a vector into a bacterial host cell; introducing a plasmid vector containing a fragment consisting of a portion of a human varicella-zoster virus genome into the bacterial host cell, wherein the fragment has at least one mutation; culturing the bacterial host cell; and isolating a vector having a BAC vector sequence from the cultured bacterial host cell. In the above-described method, homologous recombination occurs between the vector for producing a vaccine of the present invention and the plasmid vector containing the fragment consisting of the portion of the human varicella-zoster virus genome, in bacterial host cells. As a result, the vector for producing the vaccine of the present invention has a mutation in the fragment consisting of the portion of the human varicella-zoster virus genome.

[0283] In the above-described method, the step of introducing the vector into bacterial host cells can be achieved by using various well-known methods, such as electroporation and the like. Similarly, the plasmid vector containing the fragment consisting of the portion of the human varicella-zoster virus genome can be introduced into bacterial host cells. As a technique for introducing a mutation into the fragment, a technique for introducing a mutation by using PCR is well known. For example, by using heat-resistant polymerase having no proofreading function, where one of the four nucleotides is in lower quantity, it is possible to introduce a mutation randomly. Alternatively, by PCR using a primer having a mutated base sequence, it is possible to introduce a desired mutation into a desired site. When the bacterial cell is cultured, homologous recombination occurs between the vector for producing the vaccine of the present invention and the plasmid vector containing the fragment consisting of the portion of the human varicella-zoster virus genome. As a result, the vector for producing the vaccine of the present invention has a mutation in the fragment consisting of the portion of the human varicella-zoster virus genome. In order to prepare a BAC vector sequence from a bacterial host cell, various well-known techniques (e.g., the alkaline method, etc.) and commercially available kits can be used.

[0284] According to another aspect of the present invention, another method for introducing a mutation into a vector for producing the vaccine of the present invention is provided. The method comprises the steps of: introducing the vector into a bacterial host cell; introducing a first plasmid vector containing a first fragment consisting of a portion of a human varicella-zoster virus genome into the bacterial host cell, wherein the first fragment has at least one mutation; introducing a second plasmid vector containing a second fragment consisting of a portion of the human varicella-zoster virus genome into the bacterial host cell, wherein the second fragment has at least one mutation and the second fragment is different from the first fragment; culturing the bacterial host cell; and isolating a vector having a BAC vector sequence from the cultured bacterial host cell.

[0285] According to an aspect of the present invention, a nucleic acid cassette which may be used for producing the vaccine of the present invention, is provided. The nucleic acid cassette preferably comprises a first fragment capable of homologous recombination with a human varicella-zoster virus genome in a host cell, a BAC vector sequence, and a second fragment capable of homologous recombination with a human varicella-zoster virus genome in the host cell, wherein the opposite ends of the BAC sequence are linked with the first fragment and second fragments, respectively. In this case, the first fragment and the second fragment are preferably at least 1 kb, at least 1.5 kb, or at least 2 kb in length. The first fragment and the second fragment preferably are at least 80% identity, at least 85% identity, at least 90% identity, or at least 95% identity to the human varicella-zoster virus genome sequence.

[0286] Preferably, the first and second fragments are independently derived from regions selected from the group consisting of the following regions of the varicella-zoster virus genome, or independently have at least 80%, 85%, 90%, or 95% identity to regions selected from the group consisting of the following regions of the varicella-zoster virus genome: the region in the ORF of gene 11, the region in the ORF of gene 12, the region in the ORF of gene 13, the region in the ORF of gene 14, the region in the ORF of gene 15, the region in the ORF of gene 17, the region in the ORF of gene 18, the region in the ORF of gene 19, the region in the ORF of gene 38, the region in the ORF of gene 39, the region in the ORF of gene 46, the region in the ORF of gene 47, the region in the ORF of gene 48, the region in the ORF of gene 49, the region in the ORF of gene 50, the region in the ORF of gene 56, the region in the ORF of gene 57, the region in the ORF of gene 58, the region in the ORF of gene 59, the region in the ORF of gene 61, the region in the ORF of gene 62, the region in the ORF of gene 63, the region in the ORF of gene 64, the region in the ORF of gene 65, the region in the ORF of gene 66, the region in the ORF of gene 67, the region in the ORF of gene 68, the region in the ORF of gene 69, the region in the ORF of gene 70, the region flanking the ORF of gene 11, the region flanking the ORF of gene 12, the region flanking the ORF of gene 13, the region flanking the ORF of gene 14, the region flanking the ORF of gene 15, the region flanking the ORF of gene 17, the region flanking the ORF of gene 18, the region flanking the ORF of gene 19, the region flanking the ORF of gene 38, the region flanking the ORF of gene 39, the region flanking the ORF of gene 46, the region flanking the ORF of gene 47, the region flanking the ORF of gene 48, the region flanking the ORF of gene 49, the region flanking the ORF of gene 50, the region flanking the ORF of gene 56, the region flanking the ORF of gene 57, the region flanking the ORF of gene 58, the region flanking the ORF of gene 59, the region flanking the ORF of gene 61, the region flanking the ORF of gene 62, the region flanking the ORF of gene 63, the region flanking the ORF of gene 64, the region flanking the ORF of gene 65, the region flanking the ORF of gene 66, the region flanking the ORF of gene 67, the region flanking the ORF of gene 68, the region flanking the ORF of gene 69, and the region flanking the ORF of gene 70.

[0287] Preferably, the first and second fragments are derived from different regions of the human varicella-zoster virus genome. The first and second fragments may be independently derived from a region flanking the ORF of gene 11 or 12. Preferably, the BAC vector sequence comprises a recombinant protein-dependent recombinant sequence and/or a selectable marker in order to control homologous recombination and easily detect a desired gene. The selectable marker may be either a drug selectable marker or a gene encoding a fluorescent protein (e.g., a green fluorescent protein, etc.). Representatively, the BAC vector sequence has a nucleic acid sequence set forth in SEQ ID NO.: 2, and the nucleic acid cassette has a nucleic acid sequence set forth in SEQ ID No.: 2.

### Preparation of Recombinant Varicella-Zoster Virus Containing a Mutated Gene

[0288] A method of the present invention can be used to easily prepare a varicella-zoster virus having a varicella-zoster virus genome into which a mutated gene is introduced.

[0289] Such mutation introduction can be performed by using a method described below.

[0290] Into E. coli, (a) VZV-BAC-DNA plasmid and (b) a shuttle vector or a PCR product having a partial sequence of a varicella-zoster virus genome with any mutation as a mutated nucleic acid, are introduced. Homologous recombination is allowed to occur between VZV-BAC-DNA plasmid and the shuttle vector or PCR product, so that a foreign gene mutation can be introduced into VZV-BAC-DNA plasmid. Alternatively, a transposon can be used to randomly introduce a mutation. The VZV-BAC-DNA plasmid into which the mutation has been introduced, can be easily selected and grown in E. coli. By causing VZV-BAC-DNA having the mutation to produce a virus, the recombinant varicella-zoster virus can be obtained (Markus Wagner, TRENDS in Microbilogy, Vol. 10, No. 7, July 2002). Specific examples will be described below.

[0291] (1) Use of a Temperature Sensitive Shuttle Vector Containing a Mutated Varicella-Zoster Virus as a Mutated Nucleic Acid:

[0292] Firstly, the shuttle vector and VZV-BAC-DNA plasmid are allowed to recombine via a first homologous region to generate a cointegrate in which the shuttle vector is linked with VZV-BAC-DNA plasmid. Next, since the replication origin of the shuttle vector is temperature-sensitive, the shuttle plasmid is removed. In a second recombination event, the cointegrated portion is removed. When the second recombination event occurs via the first homologous region, a plasmid having the same sequence as that of VZV-BAC-DNA used for the recombination is generated. In contrast, when the second recombination event occurs via a second homologous region different from the first homologous region, a modified VZV-BAC-DNA plasmid having the foreign gene contained in the shuttle vector is obtained. When the first homologous region and the second homologous region have substantially the same length, the probability that the second recombination event occurs in the second homologous region is substantially the same as the probability that the second recombination event occurs in the first homologous region. Therefore, about half of the resultant VZV-BAC-DNA plasmids are plasmids having the same sequence as that which has been used in the recombination, while about half thereof are plasmids having the foreign gene which has been introduced into the shuttle vector.

[0293] (2) Use of a Linear DNA Fragment:

[0294] In this method, for example, by utilizing the recombination function of recET derived from prophage Rac or the recombination function of redap derived from bacteriophage X, a linear DNA fragment is used to introduce a mutation into a circular VZV-BAC-DNA molecule. Specifically, a selectable marker flanking a target sequence and a linear DNA fragment containing a homologous sequence are introduced along with VZV-BAC-DNA into E. coli capable of homologous recombination. In order to avoid the degradation of the linear DNA within E. coli, it is preferable to use E. coli lacking exonuclease or cause expression of redy (gam) which is an exonuclease inhibitor derived from a bacteriophage. The linear DNA has a region homologous to VZV-BAC-DNA plasmid on the opposite ends thereof. Homologous recombination occurs via the homologous region, thereby making it possible to introduce a desired sequence of the linear DNA fragment into VZV-BAC-DNA. RecET and redap exhibit homologous recombination via a homologous sequence having a length of about 25 to 50 nucleotides. Therefore, the recombination functions of recET and redap can be used more easily than recA-mediated homologous recombination.

[0295] (3) Use of a Transposon:

[0296] The function of a transposon element to insert into a nucleic acid in E. coli is used. For example, a transposon element containing a desired foreign gene and VZV-BAC-DNA are introduced into E. coli so that the transposon element is randomly inserted into VZV-BAC-DNA. Thereby, VZV-BAC-DNA having the inserted foreign gene is obtained.

[0297] Further, for example, it is also possible to introduce a random mutation in recombinant varicella-zoster virus genome by treating a host cell having recombinant varicella-zoster virus such as VZV-BAC-DNA employing a mutagenic agent (for example, nitrosoguanidine).

### Formulation

[0298] The present invention also provides methods of treatment and/or prevention of diseases or disorders (e.g., infectious diseases) by administration to a subject of an effective amount of a therapeutic/prophylactic agent. By the therapeutic/prophylactic agent is meant a composition of the present invention in combination with a pharmaceutically acceptable carrier type (e.g., a sterile carrier).

[0299] The therapeutic/prophylactic agent will be formulated and dosed in a fashion consistent with good medical practice, taking into account the clinical condition of the individual patient (especially the side effects of treatment with the therapeutic/prophylactic agent alone), the site of delivery, the method of administration, the scheduling of administration, and other factors known to those skilled in the art. The “effective amount” for purposes herein is thus determined by such considerations.

[0300] As a general proposition, the total pharmaceutically effective amount of the therapeutic/prophylactic agent administered parenterally per dose will be in the range of about 1 μg/kg/day to 10 mg/kg/day of patient body weight, although, as noted above, this will be subject to therapeutic discretion. More preferably, this dose is at least 0.01 mg/kg/day, and most preferably for humans between about 0.01 and 1 mg/kg/day for the cellular physiologically active material of the present invention. If given continuously, the therapeutic/prophylactic agent is typically administered at a dose rate of about 1 μg/kg/hour to about 50 μg/kg/hour, either by 1-4 injections per day or by continuous subcutaneous infusions, for example, using a mini-pump. An intravenous bag solution may also be employed. The length of treatment needed to observe changes and the interval following treatment for responses to occur appears to vary depending on the desired effect.

[0301] The therapeutic/prophylactic agents can be administered orally, rectally, parenterally, intracistemally, intravaginally, intraperitoneally, topically (as by powders, ointments, gels, drops or transdermal patch), or as an oral or nasal spray.

[0302] “Pharmaceutically acceptable carrier” refers to a non-toxic solid, semisolid or liquid filler, diluent, encapsulating material or formulation auxiliary of any type. The term “parenteral” as used herein refers to modes of administration which include intravenous, intramuscular, intraperitoneal, intrasternal, subcutaneous and intraarticular injection and infusion.

[0303] The therapeutic/prophylactic agents of the invention are also suitably administered by sustained-release systems. Suitable examples of sustained-release therapeutic/prophylactic agents are administered orally, rectally, parenterally, intracistemally, intravaginally, intraperitoneally, topically (as by powders, ointments, gels, drops or transdermal patch), or as an oral or nasal spray. “Pharmaceutically acceptable carrier” refers to a non-toxic solid, semisolid or liquid filler, diluent, encapsulating material or formulation auxiliary of any type. The term “parenteral” as used herein refers to modes of administration which include intravenous, intramuscular, intraperitoneal, intrasternal, subcutaneous and intraarticular injection and infusion.

[0304] For parenteral administration, in one embodiment, the therapeutic/prophylactic agent is formulated generally by mixing it at the desired agree of purity, in a unit obsage injectable form (solution, suspension, or emulsion), with a pharmaceutically acceptable carrier, i.e., one that is non-toxic to recipients at the dosages and concentrations employed and is compatible with other ingredients of the formulation. For example, the formulation preferably does not include oxidizing agents and other compounds that are known to be deleterious to the therapeutic/prophylactic agent.

[0305] Generally, the formulations are prepared by contacting the therapeutic/prophylactic agent uniformly and intimately with liquid carriers or finely divided solid carriers or both. Then, if necessary, the product is shaped into the desired formulation. Preferably the carrier is a parenteral carrier, more preferably a solution that is isotonic with the blood of the recipient. Examples of such carrier vehicles include water, saline, Ringer's solution, and dextrose solution. Non-aqueous vehicles such as fixed oils and ethyl oleate are also useful herein, as well as liposomes.

[0306] The carrier suitably contains minor amounts of additives such as substances that enhance isotonicity and chemical stability. Such materials are non-toxic to recipients at the dosages and concentrations employed, and include buffers such as phosphate, citrate, succinate, acetic acid, and other organic acids or their salts; antioxidants such as ascorbic acid; low molecular weight (less than about ten residues) polypeptides, e.g., polyarginine or tripeptides; proteins, such as serum albumin, gelatin, or immunoglobulins; hydrophilic polymers such as polyvinylpyrrolidone; amino acids, such as glycine, glutamic acid, aspartic acid, or arginine; monosaccharides, disaccharides, and other carbohydrates including cellulose or its derivatives, glucose, manose, or dextrins; chelating agents such as EDTA; sugar alcohols such as mannitol or sorbitol; counterions such as sodium; and/or nonionic surfactants such as polysorbates, poloxamers, or PEG.

[0307] Any pharmaceutical used for therapeutic administration can be free from organisms and viruses other than a virus as an effective ingredient, i.e., sterile. Sterility is readily accomplished by filtration through sterile filtration membranes (e.g., 0.2 micron membranes). Therapeutic/prophylactic agents generally are placed into a container having a sterile access port, for example, an intravenous solution bag or vial having a stopper pierceable by a hypodermic injection needle.

[0308] Therapeutic/prophylactic gents ordinarily will be stored in unit or multi-dose containers, for example, sealed ampoules or vials, as an aqueous solution or as a lyophilized formulation for reconstitution. As an example of a lyophilized formulation, 10-ml vials are filled with 5 ml of sterile-filtered 1% (w/v) aqueous therapeutic/prophylactic agent solution, and the resulting mixture is lyophilized. The infusion solution is prepared by reconstituting the lyophilized therapeutic/prophylactic agent using bacteriostatic Water-for-injection.

[0309] The invention also provides a pharmaceutical pack or kit comprising one or more containers filled with one or more of the ingredients of the therapeutic/prophylactic agents of the invention. Associated with such container (s) can be a notice in the form prescribed by a governmental agency regulating the manufacture, use or sale of pharmaceuticals or biological products, which notice reflects approval by the agency of manufacture, use or sale for human administration. In addition, the therapeutic/prophylactic agents may be employed in conjunction with other therapeutic compounds.

[0310] The therapeutic/prophylactic agents of the invention may be administered alone or in combination with other therapeutic agents. Therapeutic/prophylactic agents that may be administered in combination with the therapeutic/prophylactic agents of the invention, include but not limited to, chemotherapeutic agents, antibiotics, steroidal and nonsteroidal anti-inflammatories, conventional immunotherapeutic agents, cytokines and/or growth factors. Combinations may be administered either concomitantly, e.g., as an admixture, separately but simultaneously or concurrently; or sequentially. This includes presentations in which the combined agents are administered together as a therapeutic mixture, and also procedures in which the combined agents are administered separately but simultaneously, e.g., as through separate intravenous lines into the same individual. Administration “in combination” further includes the separate administration of one of the compounds or agents given first, followed by the second.

[0311] In certain embodiments, the therapeutic/prophylactic agents of the invention are administered in combination with antiretroviral agents, nucleoside reverse transcriptase inhibitors, nonnucleoside reverse transcriptase inhibitors, and/or protease inhibitors.

[0312] In a further embodiment, the therapeutic/prophylactic agents of the invention are administered in combination with an antibiotic agent. Antibiotic agents that may be used include, but are not limited to, aminoglycoside antibiotics, polyene antibiotics, penicillin antibiotics, cephem antiboitics, peptide antibiotics, microride antibiotics, and tetracycline antibiotics.

[0313] In an additional embodiment, the therapeutic/prophylactic agents of the invention are administered alone or in combination with an anti-inflammatory agent. Anti-inflammatory agents that may be administered with the therapeutic/prophylactic agents of the invention include, but are not limited to, glucocorticoids and the nonsteroidal anti-inflammatories, aminoarylcarboxylic acid derivatives, arylacetic acid derivatives, arylbutyric acid derivatives, arylcarboxylic acids, arylpropionic acid derivatives, pyrazoles, pyrazolones, salicylic acid derivatives, thiazinecarboxamides, e-acetamidocaproic acid, S-adenosylmethionine, 3-amino-4-hydroxybutyric acid, amixetrine, bendazac, benzydamine, bucolome, difenpiramide, ditazol, emorfazone, guaiazulene, nabumetone, nimesulide, orgotein, oxaceprol, paranyline, perisoxal, pifoxime, proquazone, proxazole, and tenidap.

[0314] In a further embodiment, the therapeutic/prophylactic agent of the present invention is administered in combination with other therapeutic/prophylactic regimens (e.g., radiation therapy).

[0315] Hereinafter, the present invention will be described by way of examples. However, the present invention is not limited to these examples.

### EXAMPLE 1

### Preparation of Recombinant Varicella-Zoster Virus

### 1: Preparation of BAC Plasmid

[0316] Plasmid PHA-2 used was kindly provided by Markus Wagner and Ulrich H. Koszinowski (Adler et al., (2000), J. Virol. 74: 6964-74). To prepare a recombinant virus, the region between gene 11 and gene 12 of varicella-zoster virus virus genome is selected as the insertion point of a BAC vector. This is because the insertion of a foreign nucleic acid into such a non-essential region was expected to have no adverse effect on the replication of varicella-zoster virus.

[0317] Fragments of the gene 11 ORF and the gene 12 ORF of varicella-zoster virus Oka strain was amplified with the genomic DNA of varicella-zoster virus Oka original strain as a template using primers VZ11F (SEQ ID NO.: 1) and VZ11R (SEQ ID NO.: 2) and primers VZ12F (SEQ ID NO.: 3) and VZ12R (SEQ ID NO.: 4), respectively.

### 2: Preparation of Primers Used for Producing Recombinant Plasmid

TABLE 1

Primers used to produce a recombinant plasmid

| | | |
|---|---|---|
| | | Product |
| Primer | Sequence | (base pair) and plasmid |

| | | | |
|---|---|---|---|
| VZ11F | 5-TATA ACTAGT GCGGCCGC TTACGAAAACGTGCATG-3′ | VZ ORF11(2652) | SK-VZ11-12 |
| | SpeI NofI | | |
| VZ11R | 5-CGCG ACCTGGT TTTATTTTACAAACTCCTTTGTGG-3′ | | |
| | Scr A1 | | |
| VZ12F | 5-GCGC ACCAGGT CTCTGTTTAGACCTTAAAATTTG-3′ | VZ ORF12(2161) | SK-VZ11-12 |
| | Scr A1 | | |
| VZ12R | 5-TATA GCGGCCGC TTTTAATCTGGTTGTGGAAATG-3′ | | |
| | NofI | | |

In the table, a restriction enzyme site in the sequence of an oligonucleotide is underlined, while an italicized sequence indicates a base which does not exist in the VZV sequence.

[0319] Fragments of the gene 11 ORF and the gene 12 ORF, which were produced by PCR were digested by SpeI/SexAI and NotI/SexAI, respectively. Two PCR fragments were cloned to pBluescript SK- (Stratagene) digested by SpeI and NotI. The resultant plasmid was designated as SK/VZ11-12.

[0320] Plasmid pHA-2 was digested by PacI, and then, this site was blunt-ended by treatment with T4 DNA polymerase. This plasmid was cloned into the SexAI site which was blunt-ended in SK/VZ11-12. The resulting plasmid was designated as pHA-2/VZ11-12 (FIG. 1C).

[0321] As shown in FIG. 1, VZV genome (A) is about 125 kbp in length, and comprises terminal repeat (TR) DNA domain, uniquely long (UR) DNA domain, internal repeat (IR) DNA domain, and uniquely short (US) DNA domain. To construct a recombinant plasmid PHA-2/VZV11-12 (C), as mentioned above, an ORF 11 fragment and an ORF 12 fragment of the VZV genome were produced by PCR amplification using appropriate primers. This recombinant plasmid pHA-2/VZ11-12 included flanking homologous sequence of about 2.0 kbp, which is adjacent to loxP site (L), and the BAC vector.

### 3: Preparation of Recombinant Virus by Homologous Recombination

[0322] The prepared plasmid pHA-2/VZ11-12 contains a guanine phosphoribosyl transferase (gpt) gene as a selectable marker. The BAC vector sequence is sandwiched between two loxP sequences. Therefore, the BAC vector sequence sandwiched between the loxp sequences can be efficiently removed by the action of Cre recombinase. In addition, cells into which the plasmid containing the BAC vector sequence has been introduced can be easily confirmed by the fluorescence of a green fluorescent protein (GFP).

[0323] The plasmid was digested with NotI for linearization. Nucleofector unit (Amaxa) was used to transfect HEL cells cultured to confluent in a 75-cm² plastic flask with 0.2 μg of the linearized pHA-2/VZ11-12 by electroporation. One day after transfection, the transfected cells were infected with varicella-zoster virus Oka strain.

[0324] Mycophenolic acid (50 μM) and 200 μM xanthine were used to screen recombinant viruses based on the gpt gene. In the HEL cells, the cytopathic effect (CPE) typical for varicella-zoster virus was observed. Some of the cells could be confirmed under a microscope to express the GFP. This result indicates that the BAC vector was inserted into the varicella-zoster virus genome and the GFP gene was expressed.

### 4: Enrichment of Recombinant Virus and Introduction of it into E. Coli

[0325] A recombinant virus was enriched by selection using the gpt gene in combination with mycophenolic acid and xanthine, and use of limiting dilution assay of 96 well plate. From the infected cells, circular virus DNA was extracted by Hirt's method (Hirt, (1967), J. M. Biol, 26: 365-9). The extracted DNA was introduced into E. coli DH10B by the electroporation method (0.2-cm cuvette, 2.5 kV) using the gene pulser (Bio-Rad) for transformation. E. coli containing VZV-BAC-DNA was obtained by screening on agar containing 17 μg/ml chloramphenicol.

### 5: Stability of VZV-BAC-DNA Plasmid in E. Coli

[0326] E. coli including the BAC vector (VZV-BAC-DNA) including varicella-zoster virus genome was cultured for 22-24 hours in LB Broth, passaged 3 times by employing the same method, and finally, selected on an agar-plate including chloramphenicol. Five clones were picked from the passaged E. coli, and each of the five clones were cultured in large scale in LB Broth by employing the same method, and DNA was extracted. VZV-BAC-DNA was extracted from E. coli using the Nucleobond PC 100 kit (Macherey-Nagel) in accordance with the protocol accompanying the kit. The resultant five clones and the original VZV-BAC-DNA were digested with restriction enzyme BamHI. The restriction enzyme patterns were verified on an agarose gel by electrophoresis (the result is not shown). All five clones were compared with the original VZV BAC plasmid. As a result, the identical restriction enzyme pattern was shown on the agarose gel. This indicated high stability of VZV plasmid in E. coli.

[0327] In these Figures, the original VZV-BAC-DNA and the VZV-BAC-DNA, which was passaged 3 times showed the identical electrophoratic pattern. This indicates that VZV-BAC-DNA plasmid is stable in E. coli.

### 6: Production of Virus from VZV-BAC-DNA

[0328] BAC cloned VZV rV01 (FIG. 1D) was produced in HEL cells by homologous recombination of a recombinant plasmid PHA-2/VZV11-12 and VZV virus. Specifically, HEL cells cultured to confluent in a 75-cm² plastic flask were transfected with 1 μg VZV-BAC-DNA using Nucleofector unit (Amaxa), and then the HEL cells were cultured to confluency in a 75-cm² plastic flask and were passaged two days after transfection. Two or three days after passage, typical CPE of varicella-zoster was observed. Also, cells, in which CPE were observed, were confirmed under a fluorescent microscope to express the GFP gene. Consequently, it was confirmed that the recombinant varicella-zoster virus could be produced using VZV-BAC-DNA. The produced recombinant varicella-zoster virus was designated as rV01 (FIG. 1D). VZV BAC plasmid was produced by introducing circular BAC cloned genome in E. coli.

### 7: Cutting out of BAC Vector Sequence

[0329] Recombinant adenovirus (AxCANCre) capable of expressing Cre recombinase (Kanegae et al., (1995) Nucleic Acids Res 23:3816-21) was kindly provided by Yasushi Kawaguchi of the Nagoya University. VZV rV02 (FIG. 1E; L represents loxp site) was produced by superinfection with BAC cloned VZV rV01 and the recombinant adenovirus (AxCANCre) using this recombinant adenovirus. Specifically, HEL cells were infected with the recombinant adenovirus at a MOI (multiplicity of infection) of 100. After 2 hours of virus adsorption, the cells were washed with PBS(−), followed by culturing in DMEM medium containing 5% FCS. The HEL cells were superinfected with recombinant varicella-zoster virus rV01 24 hours after infection with recombinant adenovirus. A control experiment was conducted to confirm that the recombinant adenovirus expressed Cre recombinase and that a BAC vector sequence was efficiently cut out from rV01 genome. The resultant varicella virus was designated rV02 (FIG. 1, E). The result of DNA sequencing confirmed that rV02 was a nucleic acid produced by cutting out a BAC vector sequence from rV01.

[0330] DNA which is extracted from cells infected with varicella-zoster virus Oka strain and VZV-BAC-DNA derived from E. coli were digested by restrection enzyme BamHI. Fragments derived from recombinant varicella-zoster virus rV02 DNA are larger than those of varicella-zoster virus Oka strain DNA due to the remaining one loxP sequence.

[0331] Regarding the electrophoratic pattern of VZV-BAC-DNA compared with parent strain, due to insertion of BAC vector, BamHI fragments of about 8.1 kbp disappeared, while BamHI fragments of about 7.8 kbp and 9.2 kbp were added. Also,a BamHI fragment of about 8.2 kbp of DNA, which was extracted from recombinant varicella virus rV02 infected cells, increased in size in comparison with the about 8.1 kbp BamHI fragment of the parent varicella-zoster virus, because of one loxP sequence which remains when BAC vector sequence was cut out.

### EXAMPLE 2

### Characterization of Recombinant Varicella-Zoster Virus

### 1: Comparison of Growth Ability of Recombinant Viruses

[0332] Varicella-zoster virus Oka strain and the obtained recombinant varicella-zoster virus rV02 are compared in terms of the growth ability in HEL cells using the infectious center assay method (Gomi et al., (2002) J. Virol 76 :11447-59). HEL cells in a 35 mm dish were infected at a MOI of 0.01 PFU/cell, and the infected cells were washed. After varicella-zoster virus Oka strain and rV02 strain with which HEL cells were infected were cultured from day 0 to day 5, and harvested with trypsin, these strains were infected to new HEL cells to compare the replication ability thereof. The numbers of the infected cells are normalized to the initial virus titer/dish. Multiple growth indicates the number of infected cells transmitted from one infected cell at 0 day. The result is shown at FIG. 2. As shown in FIG. 2, it indicates that the obtained recombinant varicella virus rV02 exhibits the same replication ability as that of varicella virus Oka strain (parent strain) in vitro.

### EXAMPLE 3

### Production of Mutant Recombinant Varicella-Zoster Virus with Low Pathogenicity

[0333] According to the present invention, it is possible to prepare a mutant recombinant varicella-zoster virus and to obtain a mutant varicella-zoster virus strain with low pathogenicity in a mutated virus using the following method.

### 1: Preparation of Mutant Recombinant Varicella-Zoster Virus

[0334] As a method for preparing mutant recombinant varicella-zoster virus including, for example, homologous recombination between a nucleic acid containing a mutated gene and VZV-BAC-DNA plasmid to produce mutant recombinant varicella-zoster virus. A mutated gene, which is used to cause homologous recombination with VZV-BAC-DNA plasmid may include random mutation and may include site-directed mutation. By employing each of the above methods, it is possible to obtain a population of mutant recombinant varicella-zoster virus with random mutation and a population of mutant recombinant varicella-zoster virus with site-directed mutation. The detailed description of the foregoing is as follows.

### 1.1: Preparation of Mutant Recombinant Varicella-Zoster Virus with Random Mutation

[0335] It is known that some of viruses which contain mutation in gene 62 of varicella-zoster virus genome are attenuated viruses. Therefore, in the present Example, gene 62 to which a mutation is randomly introduced using PCR is produced. The method of mutagenesis using PCR is well known. For example, it is possible to introduce a mutation randomly by using thermostable polymerase without proofreading function under the condition that the amount of one of the four nucleotides is small. Optionally, a marker gene such as a drug-resistance gene may be linked to the mutated 62 gene.

[0336] Thus, the prepared mutated gene 62 is introduced into E. coli with VZV-BAC-DNA plasmid according to Example 1 (4: Enrichment of recombinant virus and introduction of it into E. coli), and then, homologous recombination was allowed to occur between mutated gene 62 and VZV-BAC-DNA. After that, according to the method described in Example 1, DNA of varicella-zoster virus which causes homologous recombination is isolated and introduced to E. coli, and E. coli including VZV-BAC-DNA which causes homologous recombination is obtained.

[0337] The obtained plurality of E. coli contains VZV-BAC-DNA including gene 62 having mutations which are different from each other. Then, the degree of pathogenicity of varicella-zoster virus which is produced by mutant VZV-BAC-DNA included in each E. coli is screened using a method below (2: method of examining the pathogenicity of varicella-zoster virus).

### 1.2: Preparation of Mutant Recombinant Varicella-Zoster Virus Containing a Site-Directed Mutation

[0338] The methods for introducing the desired site-directed mutation is well-known in the art. For example, the full-length gene containing the desired mutation is prepared by conducting PCR using primers containing the desired mutation so as to prepare the fragment of the gene containing the desired mutation, and then, by further conducting PCR using the fragments of the mutated gene or by treating with an enzyme, such as a restriction enzyme.

[0339] Thus, mutant recombinant varicella-zoster virus containing a site-directed mutation is prepared using the procedure of above-mentioned (1.1.), regarding the prepared mutated gene.

### 2: Method of Examining the Pathogenicity of Varicella-Zoster Virus

[0340] The two methods for examining the pathogenicity of varicella-zoster virus have been established.

[0341] As a method using an animal model, the method for evaluating the pathogenicity by producing a severe combined immunodeficient (SCID) mouse to which human skin is transplanted, and then, to infect the mouse with varicella-zoster virus is well-known (J. Virol. February 1998; 72(2): 965-74,).

[0342] On the other hand, as a method for evaluating the pathogenicity in vitro is well-known, which comprises: placing monolayer cultured human melanoma in a lower-well of a two-layered well, which are separated by a trans-well of pore size 3 μm; placing cord-blood mononuclear cells (CBMC) infected with varicella-zoster virus in the upper-well; and culturing the cells for 7-8 days; then observing CPE (cytopathic effect) of the melanoma (J. Virol. February 2000; 74(4): 1864-70).

[0343] Although it is not the method for confirming the pathogenicity directly, according to the previous study of the present inventors (J. Virol. November 2002; 76(22): 11447-59), close relationships between the pathogenicity and the proliferation of a virus is understood, thus, it is also possible to evaluate the pathogenicity indirectly by examining the proliferation of cell-to-cell employing infectious center assay.

### EXAMPLE 4

### Production of Vaccine

[0344] The recombinant varicella-zoster virus obtained in Example 1 is inoculated in MRC-5 cell culture in 20 Roux bottles having a culture area of 210 cm², followed by culturing. After completion of culturing, culture medium is discarded, and the infected cells in each Roux bottle are washed with 200 ml of PBS(−) twice. Next, 20 ml of 0.03% (w/v) EDTA-3Na is overlaid on the infected cells in each Roux bottle, so that the cells are detached from the wall of the Roux bottle and suspended. The infected cell suspension in each Roux bottle is pooled, followed by centrifugation at 2,000 rpm for 10 minutes at 4° C. to collect a pellet of the infected cells. The cells are resuspended in 100 ml of PBS(−), followed by freezing and thawing once. Next, the cells are subjected to ultrasonication in ice bath (20 KHz, 150 mA, 0.3 sec/ml), followed by centrifugation at 3,000 rpm for 20 minutes at 4° C. The supernatant containing viruses released from the cells is collected, which is used as a live vaccine stock solution. 30 ml of the stock solution is sampled for examination, while saccharose and gelatin hydolysate dissolved in PBS(−), which serves as a vaccine stabilizer, is added and mixed into the remaining stock solution (70 ml) to a final concentration of 5% (w/v) and 2.5% (w/v). As a result, 140 ml of a live vaccine final bulk was prepared. 30 ml of the final bulk is sampled for examination. Thereafter, the remainder of the bulk is dispensed into 3 ml volume vials (0.5 ml for each). After lyophilization, the vial is filled with nitrogen gas and is closed with a rubber cap to hermetically seal the inside of the vial. The live vaccine aliquots are preserved at 4° C. Immediately before use, 0.5 ml of distilled water for injection is added to the lyophilized contents which are completely dissolved. On the other hand, the above-described sampled vaccine stock solution and final bulk, and 20 aliquots are subjected to assay tests. The tests are conducted to confirm safety, effectiveness, and uniformity for qualification of a live vaccine, taking into consideration the Guidelines for Biological Formulations defined under Notice No. 195 of Ministry of Health and Welfare (1989) and the guideline “recombinant precipitation hepatitis B vaccine (derived from yeast)” as defined therein. The results of the tests show that the above-described aliquot has a virus content of 2×10⁴ PFU (plaque-forming unit)/0.5 ml. When passing each test described in the guidelines, the vaccine is subsequently used as a qualified live vaccine.

### EXAMPLE 5

### Determination of Immunogenicity of Recombinant Varicella-Zoster Virus Vaccine

[0345] Immunogenicity of recombinant varicella-zoster virus vaccine strain produced in Example 4 is measured using guinea-pigs. Oka strain live vaccine is used as a control. These vaccines are subcutaneously vaccined to each of three guinea pigs of 3 weeks old (average weight is 250 g). Vaccination is adjusted by diluting each vaccine using PBS (−) so that the amount of recombinant strain and Oka strain live vaccine is 3,000 PFU/guinea pig or 2,000 PFU/guinea pig. Four, six, and eight weeks after vaccination, blood is collected from the vein in the femoral region of each vaccined guinea pig to measure the antibody value in the blood. The Neutralizing test method (Journal of General Virology, 61, 255-269, 1982) is employed for measurement of antibody value. It is confirmed that recombinant varicella-zoster virus vaccine elicit anti-VZV antibody to the same degree with Oka strain. From these results, recombinant varicella-zoster virus vaccine with good immunogenicity is selected.

[0346] Although certain preferred embodiments have been described herein, it is not intended that such embodiments be construed as limitations on the scope of the invention except as set forth in the appended claims. Various other modifications and equivalents will be apparent to and can be readily made by those skilled in the art, after reading the description herein, without departing from the scope and spirit of this invention. All patents, published patent applications and publications cited herein are incorporated by reference as if set forth fully herein.

[0347] The present invention provides a method for producing recombinant varicella-zoster virus from a single virus strain using, for example, BAC (E. coli artificial chromosome), and recombinant varicella-zoster virus produced by the method. The present invention also provides a pharmaceutical composition comprising recombinant varicella-zoster virus.

[0348] Further, the present invention provides a vector comprising a varicella-zoster virus genomic gene and a BAC vector sequence, a cell containing such a vector, and a nucleic acid cassette comprising a fragment capable of homologous recombination with a varicella-zoster virus genome, and a BAC vector sequence.

### DESCRIPTION OF SEQUENCE TABLE

[0349] SEQ ID NO.: 1, VZ11F primer
[0350] SEQ ID NO.: 2, VZ11R primer
[0351] SEQ ID NO.: 3, VZ12F primer
[0352] SEQ ID NO.: 4, VZ12R primer
[0353] SEQ ID NO.: 5, sequence of the gene 62
[0354] SEQ ID NO.: 6, sequence of the gene 62
[0355] SEQ ID NO.: 7, sequence of plasmid PHA-2
[0356] SEQ ID NO.: 8, varicella-zoster virus Dumas strain
[0357] SEQ ID NO.: 9, 5′→3′ direction 1134 to 1850 of SEQ ID NO.: 8, nucleic acid sequence encoded (gene 2)
[0358] SEQ ID NO.: 10, 5′→3′ direction 8607 to 9386 of SEQ ID NO.: 8, nucleic acid sequence encoded (gene 7)
[0359] SEQ ID NO.: 11, 5′→3′ direction 10642 to 10902 of SEQ ID NO.: 8, nucleic acid sequence encoded (gene 9A)
[0360] SEQ ID NO.: 12, 5′→3′ direction 11009 to 11917 of SEQ ID NO.: 8, nucleic acid sequence encoded (gene 9)
[0361] SEQ ID NO.: 13, 5′→3′ direction 12160 to 13392 of SEQ ID NO.: 8, nucleic acid sequence encoded (gene 10)
[0362] SEQ ID NO.: 14, 5′→3′ direction 13590 to 16049 of SEQ ID NO.: 8, nucleic acid sequence encoded (gene 11)
[0363] SEQ ID NO.: 15, 5′→3′ direction 16214 to 18199 of SEQ ID NO.: 8, nucleic acid sequence encoded (gene 12)
[0364] SEQ ID NO.: 16, 5′→3′ direction 18441 to 19346 of SEQ ID NO.: 8, nucleic acid sequence encoded (gene 13)
[0365] SEQ ID NO.: 17, 5′→3′ direction 24149 to 25516 of SEQ ID NO.: 8, nucleic acid sequence encoded (gene 17)
[0366] SEQ ID NO.: 18, 5′→3′ direction 30759 to 33875 of SEQ ID NO.: 8, nucleic acid sequence encoded (gene 21)
[0367] SEQ ID NO.: 19, 5′→3′ direction 34083 to 42374 of SEQ ID NO.: 8, nucleic acid sequence encoded (gene 22)
[0368] SEQ ID NO.: 20, 5′→3′ direction 44506 to 46263 of SEQ ID NO.: 8, nucleic acid sequence encoded (gene 26)
[0369] SEQ ID NO.: 21, 5′→3′ direction 50857 to 54471 of SEQ ID NO.: 8, nucleic acid sequence encoded (gene 29)
[0370] SEQ ID NO.: 22, 5′→3′ direction 54651 to 56963 of SEQ ID NO.: 8, nucleic acid sequence encoded (gene 30)
[0371] SEQ ID NO.: 23, 5′→3′ direction 57008 to 59614 of SEQ ID NO.: 8, nucleic acid sequence encoded (gene 31)
[0372] SEQ ID NO.: 24, 5′→3′ direction 59766 to 60197 of SEQ ID NO.: 8, nucleic acid sequence encoded (gene 32)
[0373] SEQ ID NO.: 25, 5′→3′ direction 64807 to 65832 of SEQ ID NO.: 8, nucleic acid sequence encoded (gene 36)
[0374] SEQ ID NO.: 26, 5′→3′ direction 66074 to 68599 of SEQ ID NO.: 8, nucleic acid sequence encoded (gene 37)
[0375] SEQ ID NO.: 27, 5′→3′ direction 70633 to 71355 of SEQ ID NO.: 8, nucleic acid sequence encoded (gene 39)
[0376] SEQ ID NO.: 28, 5′→3′ direction 71540 to 75730 of SEQ ID NO.: 8, nucleic acid sequence encoded (gene 40)
[0377] SEQ ID NO.: 29, 5′→3′ direction 75847 to 76797 of SEQ ID NO.: 8, nucleic acid sequence encoded (gene 41)
[0378] SEQ ID NO.: 30, 5′→3′ direction 78170 to 80200 of SEQ ID NO.: 8, nucleic acid sequence encoded (gene 43)
[0379] SEQ ID NO.: 31, 5′→3′ direction 80360 to 81451 of SEQ ID NO.: 8, nucleic acid sequence encoded (gene 44)
[0380] SEQ ID NO.: 32, 5′→3′ direction 82719 to 83318 of SEQ ID NO.: 8, nucleic acid sequence encoded (gene 46)
[0381] SEQ ID NO.: 33, 5′→3′ direction 84667 to 86322 of SEQ ID NO.: 8, nucleic acid sequence encoded (gene 48)
[0382] SEQ ID NO.: 34, 5′→3′ direction 87881 to 90388 of SEQ ID NO.: 8, nucleic acid sequence encoded (gene 51)
[0383] SEQ ID NO.: 35, 5′→3′ direction 90493 to 92808 of SEQ ID NO.: 8, nucleic acid sequence encoded (gene 52)
[0384] SEQ ID NO.: 36, 5′→3′ direction 95996 to 98641 of SEQ ID NO.: 8, nucleic acid sequence encoded (gene 55)
[0385] SEQ ID NO.: 37, 5′→3′ direction 110581 to 111417 of SEQ ID NO.: 8, nucleic acid sequence encoded (gene 63)
[0386] SEQ ID NO.: 38, 5′→3′ direction 111565 to 112107 of SEQ ID NO.: 8, nucleic acid sequence encoded (gene 64)
[0387] SEQ ID NO.: 39, 5′→3′ direction 113037 to 114218 of SEQ ID NO.: 8, nucleic acid sequence encoded (gene 66)
[0388] SEQ ID NO.:40, 5′→3′ direction 114496 to 115560 of SEQ ID NO.: 8, nucleic acid sequence encoded (gene 67)
[0389] SEQ ID NO.: 41, 5′→3′ direction 115808 to 117679 of SEQ ID NO.: 8, nucleic acid sequence encoded (gene 68)
[0390] SEQ ID NO.: 42, 5′→3′ direction 120764 to 124696 of SEQ ID NO.: 8, nucleic acid sequence encoded (gene 71)
[0391] SEQ ID NO.: 43 partial sequence of SEQ ID No.:8 (gene 27)
[0392] SEQ ID NO.: 44, 5′→3′ direction 1 to 999 of SEQ ID NO.: 43, nucleic acid sequence encoded (gene 27)
[0393] SEQ ID NO.: 45, partial sequence of SEQ ID No.:8 (gene 47)
[0394] SEQ ID NO.: 46, 5′→3′ direction 1 to 1530 of SEQ ID NO.: 45, nucleic acid sequence encoded (gene 47)
[0395] SEQ ID NO.: 47, partial sequence of SEQ ID No.:8
[0396] SEQ ID NO.: 48, 5′→3′ direction 1 to 243 of SEQ ID NO.: 47, nucleic acid sequence encoded (gene 49)
[0397] SEQ ID NO.: 49, partial sequence of SEQ ID No.:8
[0398] SEQ ID NO.: 50, 5′→3′ direction 1 to 732 of SEQ ID NO.: 49, nucleic acid sequence encoded (gene 56)
[0399] SEQ ID NO.: 51, partial sequence of SEQ ID No.:8
[0400] SEQ ID NO.: 52, 3′→5′ direction 118480 to 119316 of SEQ ID NO.: 8, nucleic acid sequence encoded (corresponding to 5569 to 6405 of SEQ ID No.: 51) (gene 70)
[0401] SEQ ID NO.: 53, 3′→5′ direction 117790 to 118332 of SEQ ID NO.: 8, nucleic acid sequence encoded (corresponding to 6553 to 7095 of SEQ ID No.: 51) (gene 69)
[0402] SEQ ID NO.: 54, 3′→5′ direction 112332 to 112640 of SEQ ID NO.: 8, nucleic acid sequence encoded (corresponding to 12245 to 12553 of SEQ ID No.: 51) (gene 65)
[0403] SEQ ID NO.: 55, 3′→5′ direction 105201 to 109133 of SEQ ID NO.: 8, nucleic acid sequence encoded (corresponding to 15752 to 19684 of SEQ ID No.: 51) (gene 62)
[0404] SEQ ID NO.: 56, 3′→5′ direction 103082 to 104485 of SEQ ID NO.: 8, nucleic acid sequence encoded (corresponding to 20400 to 21803 of SEQ ID No.: 51) (gene 61)
[0405] SEQ ID NO.: 57, 3′→5′ direction 100302 to 101219 of SEQ ID NO.: 8, nucleic acid sequence encoded (corresponding to 23666 to 24583 of SEQ ID No.: 51) (gene 59)
[0406] SEQ ID NO.: 58, 3′→5′ direction 99411 to 99626 of SEQ ID NO.: 8, nucleic acid sequence encoded (corresponding to 25259 to 25474 of SEQ ID No.: 51) (gene 57)
[0407] SEQ ID NO.: 59, 3′→5′ direction 92855 to 93850 of SEQ ID NO.: 8, nucleic acid sequence encoded (corresponding to 31035 to 32030 of SEQ ID No.: 51) (gene 53)
[0408] SEQ ID NO.: 60, 3′→5′ direction 68668 to 70293 of SEQ ID NO.: 8, nucleic acid sequence encoded (corresponding to 54592 to 56217 of SEQ ID No.: 51) (gene 38)
[0409] SEQ ID NO.: 61, 3′→5′ direction 63977 to 64753 of SEQ ID NO.: 8, nucleic acid sequence encoded (corresponding to 60132 to 60908 of SEQ ID No.: 51) (gene 35)
[0410] SEQ ID NO.: 62, 3′→5′ direction 62171 to 63910 of SEQ ID NO.: 8, nucleic acid sequence encoded (corresponding to 60975 to 62714 of SEQ ID No.: 51) (gene 34)
[0411] SEQ ID NO.: 63, 3′→5′ direction 60321 to 62138 of SEQ ID NO.: 8, nucleic acid sequence encoded (corresponding to 62747 to 64564 of SEQ ID No.: 51) (gene 33)
[0412] SEQ ID NO.: 64, 3′→5′ direction 47052 to 50636 of SEQ ID NO.: 8, nucleic acid sequence encoded (corresponding to 74249 to 77833 of SEQ ID No.: 51) (gene 28)
[0413] SEQ ID NO.: 65, 3′→5′ direction 44148 to 44618 of SEQ ID NO.: 8, nucleic acid sequence encoded (corresponding to 80267 to 80737 of SEQ ID No.: 51) (gene 25)
[0414] SEQ ID NO.: 66, 3′→5′ direction 43212 to 44021 of SEQ ID NO.: 8, nucleic acid sequence encoded (corresponding to 80864 to 81673 of SEQ ID No.: 51) (gene 24)
[0415] SEQ ID NO.: 67, 3′→5′ direction 42431 to 43138 of SEQ ID NO.: 8, nucleic acid sequence encoded (corresponding to 81747 to 82454 of SEQ ID No.: 51) (gene 23)
[0416] SEQ ID NO.: 68, 3′→5′ direction 29024 to 30475 of SEQ ID NO.: 8, nucleic acid sequence encoded (corresponding to 94410 to 95861 of SEQ ID No.: 51) (gene 20)
[0417] SEQ ID NO.: 69, 3′→5′ direction 26518 to 28845 of SEQ ID NO.: 8, nucleic acid sequence encoded (corresponding to 96040 to 98392 of SEQ ID No.: 51) (gene 19)
[0418] SEQ ID NO.: 70, 3′→5′ direction 25573 to 26493 of SEQ ID NO.: 8, nucleic acid sequence encoded (corresponding to 98392 to 99312 of SEQ ID No.: 51) (gene 18)
[0419] SEQ ID NO.: 71, 3′→5′ direction 22568 to 23794 of SEQ ID NO.: 8, nucleic acid sequence encoded (corresponding to 101091 to 102317 of SEQ ID No.: 51) (gene 16)
[0420] SEQ ID NO.: 72, 3′→5′ direction 21258 to 22478 of SEQ ID NO.: 8, nucleic acid sequence encoded (corresponding to 102407 to 103627 of SEQ ID No.: 51) (gene 15)
[0421] SEQ ID NO.: 73, 3′→5′ direction 19431 to 21113 of SEQ ID NO.: 8, nucleic acid sequence encoded (corresponding to 103772 to 105454 of SEQ ID No.: 51) (gene 14)
[0422] SEQ ID NO.: 74, 3′→5′ direction 9477 to 10667 of SEQ ID NO.: 8, nucleic acid sequence encoded (corresponding to 114218 to 115408 of SEQ ID No.: 51) (gene 8)
[0423] SEQ ID NO.: 75, 3′→5′ direction 5326 to 8577 of SEQ ID NO.: 8, nucleic acid sequence encoded (corresponding to 116308 to 119559 of SEQ ID No.: 51) (gene 6)
[0424] SEQ Id NO.: 76, 3′→5′ direction 4252 to 5274 of SEQ ID NO.: 8, nucleic acid sequence encoded (corresponding to 119611 to 120633 of SEQ ID No.: 51) (gene 5)
[0425] SEQ ID NO.: 77, 3′→5′ direction 2783 to 4141 of SEQ ID NO.: 8, nucleic acid sequence encoded (corresponding to 120744 to 122102 of SEQ ID No.: 51) (gene 4)
[0426] SEQ ID NO.: 78, 3′→5′ direction 1908 to 2447 of SEQ ID NO.: 8, nucleic acid sequence encoded (corresponding to 122438 to 122977 of SEQ ID No.: 51) (gene 3)
[0427] SEQ ID NO.: 79, 3′→5′ direction 589 to 915 of SEQ ID NO.: 8, nucleic acid sequence encoded (corresponding to 123970 to 124296 of SEQ ID No.: 51) (gene 1)
[0428] SEQ ID NO.: 80, partial sequence of SEQ ID No.:51
[0429] SEQ Id NO.: 81, 3′→5′ direction 1 to 1056 and 4556 to 5740 of SEQ ID NO.: 80, nucleic acid sequence encoded (corresponding to 46847 to 48034 and 42292 to 43347 of SEQ ID NO.: 51) (gene 42 and gene 45)
[0430] SEQ ID NO.: 82, partial sequence of SEQ ID No.:51
[0431] SEQ ID NO.: 83, 3′→5′ direction 1 to 1305 of SEQ ID NO.: 82, nucleic acid sequence encoded (corresponding to 123580 to 124884 of SEQ ID No.: 51) (gene 50)
[0432] SEQ ID NO.: 84, partial sequence of SEQ ID No.:51
[0433] SEQ ID NO.: 85, 3′→5′ direction 1 to 2307 of SEQ ID NO.: 84, nucleic acid sequence encoded (corresponding to 122578 to 124884 of SEQ ID No.: 51) (gene 54)
[0434] SEQ ID NO.: 86, partial sequence of SEQ ID No.:51
[0435] SEQ ID NO.: 87, 3′→5′ direction 1 to 663 of SEQ ID NO.: 86, nucleic acid sequence encoded (corresponding to 124222 to 124884 of SEQ ID No.: 51) (gene 58)
[0436] SEQ ID NO.: 88, partial sequence of SEQ ID No.:51
[0437] SEQ ID NO.: 89, 3′→5′ direction 1 to 427 of SEQ ID NO.: 88, nucleic acid sequence encoded (corresponding to 124458 to 124884 of SEQ ID No.: 51) (gene 60)
[0438] SEQ ID NO.: 90, partial sequence of SEQ ID No.:51
[0439] SEQ ID NO.: 91, 3′→5′ direction 1 to 903 of SEQ ID NO.: 90, nucleic acid sequence encoded (corresponding to 60321 to 61229 of SEQ ID No.: 51) (gene 33.5)

1. A live, attenuated recombinant varicella-zoster virus comprising a BAC vector sequence, wherein the BAC vector sequence is inserted into a non-essential region or the flanking region of a non-essential region of a varicella-zoster virus genome, wherein the BAC vector sequence comprises a recombinant protein dependent recombinant sequence selected from loxP, FRT site, attB, attP and a res site, and wherein the non-essential region is selected from the group consisting of the following regions:
the region flanking the ORF of gene 8, the region flanking the ORF of gene 11, the region flanking the ORF of gene 12, the region flanking the ORF of gene 13, the region flanking the ORF of gene 14, the region flanking the ORF of gene 15, the region flanking the ORF of gene 17, the region flanking the ORF of gene 18, the region flanking the ORF of gene 19, the region flanking the ORF of gene 38, the region flanking the ORF of gene 39, the region flanking the ORF of gene 47, the region flanking the ORF of gene 49, the region flanking the ORF of gene 56, the region flanking the ORF of gene 57, the region flanking the ORF of gene 58, the region flanking the ORF of gene 61, the region flanking the ORF of gene 63, the region flanking the ORF of gene 65, the region flanking the ORF of gene 67, the region flanking the ORF of gene 68, the region flanking the ORF of gene 69, and the region flanking the ORF of gene 70.

2. (canceled)

3-4. (canceled)

5. The recombinant varicella-zoster virus of claim 4, wherein the non-essential region is the region flanking the ORF of gene 11, or the region flanking the ORF of gene 12.

6-7. (canceled)

8. The recombinant varicella-zoster virus of claim 1, wherein the BAC vector sequence comprises a selectable marker.

9. The recombinant varicella-zoster virus of claim 8, wherein the selectable marker is a drug selectable marker.

10. The recombinant varicella-zoster virus of claim 1, wherein the selectable marker is a gene encoding green fluorescent protein.

11. (canceled)

12. The recombinant varicella-zoster virus of claim 1, wherein the varicella-zoster virus genome comprises sequences from a mutant type strain.

13. The recombinant varicella-zoster virus of claim 1, wherein the varicella-zoster virus genome comprises sequences from an Oka vaccine strain.

14. The recombinant varicella-zoster virus of claim 1, wherein the varicella-zoster virus genome has mutations in gene 62.

15. The recombinant varicella-zoster virus of claim 14, wherein the gene 62 comprises at least the base substitutions of the following (a)-(d) in SEQ ID NO. 5:
(a) base substitution at position 2110 for G;
(b) base substitution at position 3100 for G;
(c) base substitution at position 3818 for C; and
(d) base substitution at position 4006 for G.

16. The recombinant varicella-zoster virus of claim 1, wherein the BAC vector sequence comprises the sequence set forth in SEQ ID NO.: 7.

17. A pharmaceutical composition comprising the virus of claim 1.

18. The pharmaceutical composition of claim 17, wherein the composition is in the form of a vaccine.

19. A vector comprising a varicella-zoster virus essential gene and a BAC vector sequence other than the gene 62.

20. The vector of claim 19, further comprising the gene 62.

21. The vector of claim 19, wherein a mammalian cell produces a varicella-zoster virus when the vector is introduced into the mammalian cell.

22. The vector of claim 19, wherein a portion where a sequence derived from the varicella-zoster virus genome is linked to the BAC vector sequence is within a non-essential region of the varicella-zoster virus genome.

23. The vector of claim 22, wherein the non-essential region is selected from the group consisting of the following regions of:
the region in the ORF of gene 7, the region in the ORF of gene 8, the region in the ORF of gene 9, the region in the ORF of gene 10, the region in the ORF of gene 11, the region in the ORF of gene 12, the region in the ORF of gene 13, the region in the ORF of gene 14, the region in the ORF of gene 15, the region in the ORF of gene 17, the region in the ORF of gene 18, the region in the ORF of gene 19, the region in the ORF of gene 38, the region in the ORF of gene 39, the region in the ORF of gene 46, the region in the ORF of gene 47, the region in the ORF of gene 48, the region in the ORF of gene 49, the region in the ORF of gene 50, the region in the ORF of gene 56, the region in the ORF of gene 57, the region in the ORF of gene 58, the region in the ORF of gene 59, the region in the ORF of gene 61, the region in the ORF of gene 63, the region in the ORF of gene 64, the region in the ORF of gene 65, the region in the ORF of gene 66, the region in the ORF of gene 67, the region in the ORF of gene 68, the region in the ORF of gene 69, the region in the ORF of gene 70, the region flanking the ORF of gene 7, the region flanking the ORF of gene 8, the region flanking the ORF of gene 9, the region flanking the ORF of gene 10, the region flanking the ORF of gene 11, the region flanking the ORF of gene 12, the region flanking the ORF of gene 13, the region flanking the ORF of gene 14, the region flanking the ORF of gene 15, the region flanking the ORF of gene 17, the region flanking the ORF of gene 18, the region flanking the ORF of gene 19, the region flanking the ORF of gene 38, the region flanking the ORF of gene 39, the region flanking the ORF of gene 46, the region flanking the ORF of gene 47, the region flanking the ORF of gene 48, the region flanking the ORF of gene 49, the region flanking the ORF of gene 50, the region flanking the ORF of gene 56, the region flanking the ORF of gene 57, the region flanking the ORF of gene 58, the region flanking the ORF of gene 59, the region flanking the ORF of gene 61, the region flanking the ORF of gene 63, the region flanking the ORF of gene 64, the region flanking the ORF of gene 65, the region flanking the ORF of gene 66, the region flanking the ORF of gene 67, the region flanking the ORF of gene 68, the region flanking the ORF of gene 69, the region flanking the ORF of gene 70.

24. The vector of claim 23, wherein the portion for linking is the region flanking the ORF of gene 11 and the region flanking the ORF of gene 12.

25. The vector of claim 19, wherein a portion where a sequence derived from the varicella-zoster virus genome is linked to the BAC vector sequence is in the ORF of gene 62 of the varicella-zoster virus genome.

26. The vector of claim 19, wherein the BAC vector sequence comprises recombinant protein dependent recombinant sequence.

27. The vector of claim 19, wherein the BAC vector sequence comprises a selectable marker.

28. The vector of claim 27, wherein the selectable marker is a drug selectable marker.

29. The vector of claim 27, wherein the selectable marker is a gene encoding green fluorescent protein.

30. (canceled)

31. The vector of claim 19, wherein the varicella-zoster virus genome is derived from a mutant type strain.

32. The vector of claim 19, wherein the varicella-zoster virus genome is derived from Oka vaccine strain.

33. The vector of claim 19, wherein the varicella-zoster virus genome have mutations in gene 62 and gene 6.

34. The vector of claim 33, wherein the gene 62 comprises at least the base substitutions of the following (a)-(d) in SEQ ID NO. 5:
(a) base substitution at position 2110 for G;
(b) base substitution at position 3100 for G;
(c) base substitution at position 3818 for C; and
(d) base substitution at position 4006 for G.

35. The vector of claim 19, wherein the BAC vector sequence comprises the sequence set forth in SEQ ID NO.: 7.

36. A cell comprising the vector of claim 19.

37. The cell of claim 36, wherein the cell is a bacterial cell.

38. The bacterial cell of claim 37, wherein the bacterial cell is E. coli.

39. The cell of claim 36, wherein the cell is a mammalian cell.

40. The mammalian cell of claim 39, wherein the mammalian cell is derived from human.

41-43. (canceled)

44. A method to produce recombinant varicella-zoster virus, comprising:
introducing a vector comprising a varicella-zoster virus genome essential gene other than gene 62 and BAC vector sequence into a mammalian host cell; and
culturing the mammalian host cell to produce recombinant varicella-zoster virus, wherein a portion where a sequence derived from the varicella-zoster virus genome is linked to the BAC vector sequence is within a non-essential region of the varicella-zoster virus genome wherein the non-essential region is selected from the group consisting of the following regions:
the region flanking the ORF of gene 8, the region flanking the ORF of gene 11, the region flanking the ORF of gene 12, the region flanking the ORF of gene 13, the region flanking the ORF of gene 14, the region flanking the ORF of gene 15, the region flanking the ORF of gene 17, the region flanking the ORF of gene 18, the region flanking the ORF of gene 19, the region flanking the ORF of gene 38, the region flanking the ORF of gene 39, the region flanking the ORF of gene 47, the region flanking the ORF of gene 49, the region flanking the ORF of gene 56, the region flanking the ORF of gene 57, the region flanking the ORF of gene 58, the region flanking the ORF of gene 61, the region flanking the ORF of gene 63, the region flanking the ORF of gene 65, the region flanking the ORF of gene 67, the region flanking the ORF of gene 68, the region flanking the ORF of gene 69, and the region flanking the ORF of gene 70.

45. The method of claim 44, wherein the vector further comprises the gene 62.

46. The method of claim 44, wherein the mammalian host cell is derived from human.

47. The method of claim 44, wherein the BAC vector sequence comprises at least two recombinant protein dependent recombinant sequences.

48. The method of claim 47, further comprising a step of recombination between the two recombinant protein dependent recombinant sequences.

49. The method of claim 44, wherein a portion where a sequence derived from the varicella-zoster virus genome is linked to the BAC vector sequence is within a non-essential region of the varicella-zoster virus genome.

50. (canceled)

51. The vector of claim 50, wherein the portion which is linked is the region flanking the ORF of gene 11 or the region flanking the ORF of gene 12.

52. The vector of claim 44, wherein a portion where a sequence derived from the varicella-zoster virus genome is linked to the BAC vector sequence is in the ORF of gene 62 of the varicella-zoster virus genome.

53. The method of claim 44, wherein the BAC vector sequence comprises recombinant protein dependent recombinant sequence.

54. The method of claim 44, wherein the BAC vector sequence comprises a selectable marker.

55. The method of claim 54, wherein the selectable marker is a drug selectable marker.

56. The method of claim 54, wherein the selectable marker is a gene encoding green fluorescent protein.

57. (canceled)

58. The method of claim 44, wherein the varicella-zoster virus genome is derived from a mutant type strain.

59. The method of claim 44, wherein the varicella-zoster virus genome is derived from Oka vaccine strain.

60. The method of claim 44, wherein the varicella-zoster virus genome has mutations in gene 62 and gene 6.

61. The method of claim 60, wherein the gene 62 comprises at least the base substitutions of the following (a)-(d) in SEQ ID NO. 5:
(a) base substitution at position 2110 for G;
(b) base substitution at position 3100 for G;
(c) base substitution at position 3818 for C; and
(d) base substitution at position 4006 for G.

62. The method of claim 44, wherein the BAC vector sequence comprises the sequence set forth in SEQ ID NO.: 7.

63-65. (canceled)

66. A method to introduce a mutation into the vector of claim 19, comprising:
introducing the vector into a bacterial host cell;
introducing a plasmid vector comprising a fragment consisting of a portion of varicella-zoster virus genome into the bacterial host cell, wherein the fragment has at least one mutation;
culturing the bacterial host cell;
isolating a vector having BAC sequence from the cultured bacterial host cell.

67. A method to introduce a mutation into the vector of claim 19, comprising:
introducing the vector into a bacterial host cell;
introducing a first plasmid vector comprising a first fragment consisting of a portion of varicella-zoster virus genome into the bacterial host cell, wherein the first fragment has at least one mutation;
introducing a second plasmid vector comprising a second fragment consisting of a portion of varicella-zoster virus genome into the bacterial host cell, wherein the second fragment has at least one mutation, and the first fragment is different from the second fragment;
culturing the bacterial host cell;
isolating a vector having BAC sequence from the cultured bacterial host cell.

68. A nucleic acid cassette comprising a first fragment which can recombine with varicella-zoster virus genome in a bacterial cell, BAC vector sequence, and a second fragment which can recombine with varicella-zoster virus genome in a bacterial cell,
wherein the both ends of the BAC sequence are linked to the first and the second fragment, respectively.

69. The nucleic acid cassette of claim 68, wherein the first fragment and the second fragment are at least 1 kb.

70. The nucleic acid cassette of claim 68, wherein the first fragment and the second fragment are at least 1.5 kb.

71. The nucleic acid cassette of claim 68, wherein the first fragment and the second fragment are at least 2 kb.

72. The nucleic acid cassette of claim 68, wherein the first fragment and the second fragment are at least 80% identical with a varicella-zoster virus genome sequence.

73. The nucleic acid cassette of claim 68, wherein the first fragment and the second fragment are at least 85% identical with a varicella-zoster virus genome sequence.

74. The nucleic acid cassette of claim 68, wherein the first fragment and the second fragment are at least 90% identical with a varicella-zoster virus genome sequence.

75. The nucleic acid cassette of claim 68, wherein the first fragment and the second fragment are at least 95% identical with a varicella-zoster virus genome sequence.

76. The nucleic acid cassette of claim 68, wherein each of the first fragment and the second fragment are independently selected from the group consisting of the following regions of varicella-zoster virus genome:
the region in the ORF of gene 7, the region in the ORF of gene 8, the region in the ORF of gene 9, the region in the ORF of gene 10, the region in the ORF of gene 11, the region in the ORF of gene 12, the region in the ORF of gene 13, the region in the ORF of gene 14, the region in the ORF of gene 15, the region in the ORF of gene 17, the region in the ORF of gene 18, the region in the ORF of gene 19, the region in the ORF of gene 38, the region in the ORF of gene 39, the region in the ORF of gene 46, the region in the ORF of gene 47, the region in the ORF of gene 48, the region in the ORF of gene 49, the region in the ORF of gene 50, the region in the ORF of gene 56, the region in the ORF of gene 57, the region in the ORF of gene 58, the region in the ORF of gene 59, the region in the ORF of gene 61, the region in the ORF of gene 62, the region in the ORF of gene 63, the region in the ORF of gene 64, the region in the ORF of gene 65, the region in the ORF of gene 66, the region in the ORF of gene 67, the region in the ORF of gene 68, the region in the ORF of gene 69, the region in the ORF of gene 70, the region flanking the ORF of gene 7, the region flanking the ORF of gene 8, the region flanking the ORF of gene 9, the region flanking the ORF of gene 10, the region flanking the ORF of gene 11, the region flanking the ORF of gene 12, the region flanking the ORF of gene 13, the region flanking the ORF of gene 14, the region flanking the ORF of gene 15, the region flanking the ORF of gene 17, the region flanking the ORF of gene 18, the region flanking the ORF of gene 19, the region flanking the ORF of gene 38, the region flanking the ORF of gene 39, the region flanking the ORF of gene 46, the region flanking the ORF of gene 47, the region flanking the ORF of gene 48, the region flanking the ORF of gene 49, the region flanking the ORF of gene 50, the region flanking the ORF of gene 56, the region flanking the ORF of gene 57, the region flanking the ORF of gene 58, the region flanking the ORF of gene 59, the region flanking the ORF of gene 61, the region flanking the ORF of gene 62, the region flanking the ORF of gene 63, the region flanking the ORF of gene 64, the region flanking the ORF of gene 65, the region flanking the ORF of gene 66, the region flanking the ORF of gene 67, the region flanking the ORF of gene 68, the region flanking the ORF of gene 69, the region flanking the ORF of gene 70.

77. The nucleic acid cassette of claim 68, wherein each of the first fragment and the second fragment is independently at least 80% identical with the region selected from the group consisting of the following regions of varicella-zoster virus genome:
the region in the ORF of gene 7, the region in the ORF of gene 8, the region in the ORF of gene 9, the region in the ORF of gene 10, the region in the ORF of gene 11, the region in the ORF of gene 12, the region in the ORF of gene 13, the region in the ORF of gene 14, the region in the ORF of gene 15, the region in the ORF of gene 17, the region in the ORF of gene 18, the region in the ORF of gene 19, the region in the ORF of gene 38, the region in the ORF of gene 39, the region in the ORF of gene 46, the region in the ORF of gene 47, the region in the ORF of gene 48, the region in the ORF of gene 49, the region in the ORF of gene 50, the region in the ORF of gene 56, the region in the ORF of gene 57, the region in the ORF of gene 58, the region in the ORF of gene 59, the region in the ORF of gene 61, the region in the ORF of gene 62, the region in the ORF of gene 63, the region in the ORF of gene 64, the region in the ORF of gene 65, the region in the ORF of gene 66, the region in the ORF of gene 67, the region in the ORF of gene 68, the region in the ORF of gene 69, the region in the ORF of gene 70, the region flanking the ORF of gene 7, the region flanking the ORF of gene 8, the region flanking the ORF of gene 9, the region flanking the ORF of gene 10, the region flanking the ORF of gene 11, the region flanking the ORF of gene 12, the region flanking the ORF of gene 13, the region flanking the ORF of gene 14, the region flanking the ORF of gene 15, the region flanking the ORF of gene 17, the region flanking the ORF of gene 18, the region flanking the ORF of gene 19, the region flanking the ORF of gene 38, the region flanking the ORF of gene 39, the region flanking the ORF of gene 46, the region flanking the ORF of gene 47, the region flanking the ORF of gene 48, the region flanking the ORF of gene 49, the region flanking the ORF of gene 50, the region flanking the ORF of gene 56, the region flanking the ORF of gene 57, the region flanking the ORF of gene 58, the region flanking the ORF of gene 59, the region flanking the ORF of gene 61, the region flanking the ORF of gene 62, the region flanking the ORF of gene 63, the region flanking the ORF of gene 64, the region flanking the ORF of gene 65, the region flanking the ORF of gene 66, the region flanking the ORF of gene 67, the region flanking the ORF of gene 68, the region flanking the ORF of gene 69, the region flanking the ORF of gene 70.

78. The nucleic acid cassette of claim 68, wherein each of the first fragment and the second fragment is independently at least 85% identical with the region selected from the group consisting of the following regions of varicella-zoster virus genome:
the region in the ORF of gene 7, the region in the ORF of gene 8, the region in the ORF of gene 9, the region in the ORF of gene 10, the region in the ORF of gene 11, the region in the ORF of gene 12, the region in the ORF of gene 13, the region in the ORF of gene 14, the region in the ORF of gene 15, the region in the ORF of gene 17, the region in the ORF of gene 18, the region in the ORF of gene 19, the region in the ORF of gene 38, the region in the ORF of gene 39, the region in the ORF of gene 46, the region in the ORF of gene 47, the region in the ORF of gene 48, the region in the ORF of gene 49, the region in the ORF of gene 50, the region in the ORF of gene 56, the region in the ORF of gene 57, the region in the ORF of gene 58, the region in the ORF of gene 59, the region in the ORF of gene 61, the region in the ORF of gene 62, the region in the ORF of gene 63, the region in the ORF of gene 64, the region in the ORF of gene 65, the region in the ORF of gene 66, the region in the ORF of gene 67, the region in the ORF of gene 68, the region in the ORF of gene 69, the region in the ORF of gene 70, the region flanking the ORF of gene 7, the region flanking the ORF of gene 8, the region flanking the ORF of gene 9, the region flanking the ORF of gene 10, the region flanking the ORF of gene 11, the region flanking the ORF of gene 12, the region flanking the ORF of gene 13, the region flanking the ORF of gene 14, the region flanking the ORF of gene 15, the region flanking the ORF of gene 17, the region flanking the ORF of gene 18, the region flanking the ORF of gene 19, the region flanking the ORF of gene 38, the region flanking the ORF of gene 39, the region flanking the ORF of gene 46, the region flanking the ORF of gene 47, the region flanking the ORF of gene 48, the region flanking the ORF of gene 49, the region flanking the ORF of gene 50, the region flanking the ORF of gene 56, the region flanking the ORF of gene 57, the region flanking the ORF of gene 58, the region flanking the ORF of gene 59, the region flanking the ORF of gene 61, the region flanking the ORF of gene 62, the region flanking the ORF of gene 63, the region flanking the ORF of gene 64, the region flanking the ORF of gene 65, the region flanking the ORF of gene 66, the region flanking the ORF of gene 67, the region flanking the ORF of gene 68, the region flanking the ORF of gene 69, the region flanking the ORF of gene 70.

79. The nucleic acid cassette of claim 68, wherein each of the first fragment and the second fragment is independently at least 90% identical with the region selected from the group consisting of the following regions of varicella-zoster virus genome:
the region in the ORF of gene 7, the region in the ORF of gene 8, the region in the ORF of gene 9, the region in the ORF of gene 10, the region in the ORF of gene 11, the region in the ORF of gene 12, the region in the ORF of gene 13, the region in the ORF of gene 14, the region in the ORF of gene 15, the region in the ORF of gene 17, the region in the ORF of gene 18, the region in the ORF of gene 19, the region in the ORF of gene 38, the region in the ORF of gene 39, the region in the ORF of gene 46, the region in the ORF of gene 47, the region in the ORF of gene 48, the region in the ORF of gene 49, the region in the ORF of gene 50, the region in the ORF of gene 56, the region in the ORF of gene 57, the region in the ORF of gene 58, the region in the ORF of gene 59, the region in the ORF of gene 61, the region in the ORF of gene 62, the region in the ORF of gene 63, the region in the ORF of gene 64, the region in the ORF of gene 65, the region in the ORF of gene 66, the region in the ORF of gene 67, the region in the ORF of gene 68, the region in the ORF of gene 69, the region in the ORF of gene 70, the region flanking the ORF of gene 7, the region flanking the ORF of gene 8, the region flanking the ORF of gene 9, the region flanking the ORF of gene 10, the region flanking the ORF of gene 11, the region flanking the ORF of gene 12, the region flanking the ORF of gene 13, the region flanking the ORF of gene 14, the region flanking the ORF of gene 15, the region flanking the ORF of gene 17, the region flanking the ORF of gene 18, the region flanking the ORF of gene 19, the region flanking the ORF of gene 38, the region flanking the ORF of gene 39, the region flanking the ORF of gene 46, the region flanking the ORF of gene 47, the region flanking the ORF of gene 48, the region flanking the ORF of gene 49, the region flanking the ORF of gene 50, the region flanking the ORF of gene 56, the region flanking the ORF of gene 57, the region flanking the ORF of gene 58, the region flanking the ORF of gene 59, the region flanking the ORF of gene 61, the region flanking the ORF of gene 62, the region flanking the ORF of gene 63, the region flanking the ORF of gene 64, the region flanking the ORF of gene 65, the region flanking the ORF of gene 66, the region flanking the ORF of gene 67, the region flanking the ORF of gene 68, the region flanking the ORF of gene 69, the region flanking the ORF of gene 70.

80. The nucleic acid cassette of claim 68, wherein each of the first fragment and the second fragment is independently at least 95% identical with the region selected from the group consisting of the following regions of varicella-zoster virus genome:
the region in the ORF of gene 7, the region in the ORF of gene 8, the region in the ORF of gene 9, the region in the ORF of gene 10, the region in the ORF of gene 11, the region in the ORF of gene 12, the region in the ORF of gene 13, the region in the ORF of gene 14, the region in the ORF of gene 15, the region in the ORF of gene 17, the region in the ORF of gene 18, the region in the ORF of gene 19, the region in the ORF of gene 38, the region in the ORF of gene 39, the region in the ORF of gene 46, the region in the ORF of gene 47, the region in the ORF of gene 48, the region in the ORF of gene 49, the region in the ORF of gene 50, the region in the ORF of gene 56, the region in the ORF of gene 57, the region in the ORF of gene 58, the region in the ORF of gene 59, the region in the ORF of gene 61, the region in the ORF of gene 62, the region in the ORF of gene 63, the region in the ORF of gene 64, the region in the ORF of gene 65, the region in the ORF of gene 66, the region in the ORF of gene 67, the region in the ORF of gene 68, the region in the ORF of gene 69, the region in the ORF of gene 70, the region flanking the ORF of gene 7, the region flanking the ORF of gene 8, the region flanking the ORF of gene 9, the region flanking the ORF of gene 10, the region flanking the ORF of gene 11, the region flanking the ORF of gene 12, the region flanking the ORF of gene 13, the region flanking the ORF of gene 14, the region flanking the ORF of gene 15, the region flanking the ORF of gene 17, the region flanking the ORF of gene 18, the region flanking the ORF of gene 19, the region flanking the ORF of gene 38, the region flanking the ORF of gene 39, the region flanking the ORF of gene 46, the region flanking the ORF of gene 47, the region flanking the ORF of gene 48, the region flanking the ORF of gene 49, the region flanking the ORF of gene 50, the region flanking the ORF of gene 56, the region flanking the ORF of gene 57, the region flanking the ORF of gene 58, the region flanking the ORF of gene 59, the region flanking the ORF of gene 61, the region flanking the ORF of gene 62, the region flanking the ORF of gene 63, the region flanking the ORF of gene 64, the region flanking the ORF of gene 65, the region flanking the ORF of gene 66, the region flanking the ORF of gene 67, the region flanking the ORF of gene 68, the region flanking the ORF of gene 69, the region flanking the ORF of gene 70.

81. The nucleic acid cassette of claim 68, wherein the first fragment and the second fragment are derived from different regions.

82. The nucleic acid cassette of claim 72, wherein each of the first fragment and the second fragment are independently from the region flanking the ORF of gene 11 or the region flanking the ORF of gene 12.

83. The nucleic acid cassette of claim 68, wherein the BAC vector sequence comprises recombinant protein dependent recombinant sequence.

84. The nucleic acid cassette of claim 68, wherein the BAC vector sequence comprises a selectable marker.

85. The nucleic acid cassette of claim 84, wherein the selectable marker is a drug selectable marker.

86. The nucleic acid cassette of claim 68, wherein the selectable marker is a gene encoding green fluorescent protein.

87. (canceled)

88. The nucleic acid cassette of claim 68, wherein the varicella-zoster virus genome is derived from a mutant type strain.

89. The nucleic acid cassette of claim 68, wherein the varicella-zoster virus genome is derived from Oka vaccine strain.

90. The nucleic acid cassette of claim 68, wherein the BAC vector sequence comprises the sequence set forth in SEQ ID NO.: 7.

91. The nucleic acid cassette of claim 68, having a nucleic acid sequence set forth in SEQ ID NO.: 2.

The application's sequence listing, which the Patent Office published only in electronic form, follows.

SEQUENCE LISTING (91 sequences)

SEQ ID NO: 1 - DNA, 35 bp, Artificial
  primer
tataactagtgcggccgcttacgaaaacgtgcatg

SEQ ID NO: 2 - DNA, 34 bp, Artificial
  primer
cgcgacctggtttattttacaaactcctttgtgg

SEQ ID NO: 3 - DNA, 34 bp, Artificial
  primer
gcgcaccaggtctctgtttagaccttaaaatttg

SEQ ID NO: 4 - DNA, 34 bp, Artificial
  primer
tatagcggccgcttttaatctggttgtggaaatg

SEQ ID NO: 5 - DNA, 4226 bp, Varicella zoster
  CDS (229)..(4158): Varicella zoster
  misc_feature (99)..(99): The 'Xaa' at location 99 stands for Thr, or Met.
  misc_feature (512)..(512): The 'Xaa' at location 512 stands for Ala, or Val.
  misc_feature (1275)..(1275): The 'Xaa' at location 1275 stands for Ser, or Leu.
atactatggtccatgaacttcccgcctcgagtctcgtccaatcactacatcgtcttatcattaagaatatttacacggtgacgacacggggaggaaatatgcggtcgaggggggggcacaacacgttttaagtactgttggaactccctcaccaaccgcaaycgcaatcctttgaaggctgcgagagcgtttggaaaactcgggtacgtctaaattcaccccagygcgatggatacgccgccgatgcagcgctctacaccccaacgcgcggggtcgcctgatactttggagttaatggacctgttggacgcggccgccgcggccgccgaacacagggcccgggtggtcacctcgagtcagcctgacgatctactatttggagagaacggggtcatggtgggacgggaacatgagatcgtttcaattccctccgtatcgggacttcaaccagaacccagaacggaagatgttggcgaagagctaacacaagacgactacgtatgcgaggacggtcaggatctaaygggctcgcctgtaatcccgctggccgaggtcttccacacccgattctcggaggccggcgcgcgagaaccaacaggagccgatcgctccctcgagacagtctctctcggaacgaagcttgctaggtctccaaaaccaccgatgaacgatggggaaacgggcagaggtacgacccctccgttcccgcaggccttctcccctgtatcccccgcgtctcctgttggagacgccgccgggaacgatcaacgggaagaccagcggtctataccccgacaaacgacgagaggaaattcaccaggtttgccgtcggtggtccatcgagacagacaaactcagtccatctcgggtaaaaagccgggcgatgagcaagcgggtcatgcgcatgcatcgggggacggagtagttctccagaaaactcaacggcccgctcagggaaagagcccgaagaaaaagactttgaaggttaaggtcccactcccggcgcggaaacccggtggacctgtacccggcccggttgagcaattgtaccacgtcctttcggacagcgttcccgctaagggggcaaaggcggacctgccgtttgagaccgatgatacccgcccaaggaaacatgatgcccggggtataacacctcgcgtccctggacgttcgtcggggggcaaacctagagcgtttttggccctgccgggaagatcccacgcaccagacccgattgaggatgacagcccggtggagaaaaagccaaagagtcgtgagtttgtttcgtcttcatcctcttcctcgtcgtggggatcgtcatcggaggatgaagacgatgaaccccggcgcgtttcggtgggaagtgaaactacaggcagcaggtccggacgcgaacacgccccttccccgtcaaattcggatgattcggactcaaatgatggtgggtcgacgaaacaaaatatccaaccgggatatcgatccatcagcggtcccgatccgaggattcgtaagaccaaacgtcttgcgggggaaccggggcgccagagacagaaatcattttccctgccgcgatccagaaccccgataattcccccggtgtcggggccgctcatgatgcccgacggaagcccttggcccggatcggcgcccctcccatccaacagggtgcggtttggaccgtccggggagaccagagagggtcactgggaggatgaggctgtgagagcggcgcgggctcgttacgaggcctcaactgaacccgygccgctttacgtgccggagttgggagatccggctagacagtaccgcgcgctgattaacctgatctactgtccagacagagaccctatagcatggctccagaaccccaagctgaccggtgtcaactcggccctgaaccagttctaccaaaagctgttgccaccgggacgggcgggtaccgccgttacggggagcgtagcgtctcccgttccgcatgtaggcgaagccatggccacgggggaggccctctgggctctcccccacgcggccgcggccgtggctatgagccgtcggtacgaccgggcccaaaaacactttatcctacagagtctccgcagagcctttgccggcatggcataccccgaggcaacgggctccagtccggcggcgcggatctcccgcggtcacccttctccaacaaccccggccacacagactcccgaccctcagccgtcggccgccgcgcgctctctttctgtgtgtccaccggatgatcgtttacgaactccgcgcaagcgcaagtcccagccagtcgagagcagaagcctcctcgacaagattagggagacacccgtcgcggacgcccgggttgcagacgatcatgtggtttccaaggccaagaggcgggtatccgagcccgtgaccatcacctcgggccctgtggtggatccccccgccgtaataacgatgccacttgacggaccggccccaaacgggggatttcggcgtattccccggggggccctgcataccccggtcccgtcggaccaggctcgcaaggcgtactgtacccccgaaaccatcgcccgtctggtcgacgacccattgtttcccacggcctggcgccctgcgctaagctttgatcccggcgccttggcggaaatcgccgctcggcgtccgggcggaggagaccgacggtttggtccacccagcggagtggaggcgctgcgacggaggtgcgcctggatgcggcagatcccagacccggaggatgtgaggcttctgatcatctacgatccgttgcccggagaggacatcaacggccccctcgagagcaccctcgcgacagatccgggaccgtcatggagtccatcccgagggggactgtctgtggtcctggcagccctgagtaaccggttgtgcctgccgagcactcatgcctgggccgggaactggaccggcccgccggacgtgtccgctttgaacgcccggggcgttttattactgtcgacccgagacctggcctttgccggggccgtcgagtatctaggctcgcggttggcctctgcccggcgccggttgctggtgttggacgcggtggccctcgagaggtggcccggggatggacccgctttgtctcagtatcacgtgtacgtccgggccccggcgcgaccggacgcccaggccgtcgtccgatggccagactcggcggtcacagaaggactcgcccgggccgtgtttgcatcgtcgcgcacctttgggccagcgagttttgctcgtatcgagactgcgtttgccaacctgtacccgggcgaacaacccctgtgtttgtgccgcggtgggaacgtcgcatacaccgtgtgtacccgcgcgggccccaagacccgcgtccccctgtcgccccgtgaataccggcagtacgtgctgccgggttttgacggttgcaaggacctcgcgcgacagtctcggggtctggggctcggggcagccgactttgtggacgaggcggcacatagccaccgcgcagcaaaccgatggggcctgggtgccgcgcttcgacccgtcttccttcccgagggacggagaccgggggccgccgggccggaggccggcgacgtacccacctgggcgagggtgttttgccgccacgccctgctggaacccgaccctgccgcggaaccactcgtgcttccacccgtggccggtcggtcggtggcgctgtatgcgtcggcggacgaggctcggaatgccctccccccgattcccagagtaatgtggccgcccggttttggggccgcggagacggtgttggaggggagcgacggaacacggttcgcgttcggacaccacgggggctcggaacggccggcagaaacccaggcggggcgacagcggcgcaccgcagacgacagagaacacgctttggagccggacgattgggaggtggggtgtgaagacgcgtgggacagcgaggaggggggcggggacgacggggacgcaccggggtcatcctttggggtgagcgtcgtgtcggtggccccgggtgtgctgcgagaccgccgggtgggctygcgcccggcggtcaaggtggagctgttgtcctcgtcctcgtcctccgaggacgaggacgatgtgtggggagggcgcggggggaggagccccccgcagagtcgggggtgacggagtcccctccttttctcgtgagcgccacyggcgcgcggactgtttgttgtttgttaataaaa

SEQ ID NO: 6 - protein, 1310 aa, Varicella zoster
  misc_feature (99)..(99): The 'Xaa' at location 99 stands for Thr, or Met.
  misc_feature (512)..(512): The 'Xaa' at location 512 stands for Ala, or Val.
  misc_feature (1275)..(1275): The 'Xaa' at location 1275 stands for Ser or Leu.
MDTPPMQRSTPQRAGSPDTLELMDLLDAAAAAAEHRARVVTSSQPDDLLFGENGVMVGREHEIVSIPSVSGLQPEPRTEDVGEELTQDDYVCEDGQDLXGSPVIPLAEVFHTRFSEAGAREPTGADRSLETVSLGTKLARSPKPPMNDGETGRGTTPPFPQAFSPVSPASPVGDAAGNDQREDQRSIPRQTTRGNSPGLPSVVHRDRQTQSISGKKPGDEQAGHAHASGDGVVLQKTQRPAQGKSPKKKTLKVKVPLPARKPGGPVPGPVEQLYHVLSDSVPAKGAKADLPFETDDTRPRKHDARGITPRVPGRSSGGKPRAFLALPGRSHAPDPIEDDSPVEKKPKSREFVSSSSSSSSWGSSSEDEDDEPRRVSVGSETTGSRSGREHAPSPSNSDDSDSNDGGSTKQNIQPGYRSISGPDPRIRKTKRLAGEPGRQRQKSFSLPRSRTPIIPPVSGPLMMPDGSPWPGSAPLPSNRVRFGPSGETREGHWEDEAVRAARARYEASTEPXPLYVPELGDPARQYRALINLIYCPDRDPIAWLQNPKLTGVNSALNQFYQKLLPPGRAGTAVTGSVASPVPHVGEAMATGEALWALPHAAAAVAMSRRYDRAQKHFILQSLRRAFAGMAYPEATGSSPAARISRGHPSPTTPATQTPDPQPSAAARSLSVCPPDDRLRTPRKRKSQPVESRSLLDKIRETPVADARVADDHVVSKAKRRVSEPVTITSGPVVDPPAVITMPLDGPAPNGGFRRIPRGALHTPVPSDQARKAYCTPETIARLVDDPLFPTAWRPALSFDPGALAEIAARRPGGGDRRFGPPSGVEALRRRCAWMRQIPDPEDVRLLIIYDPLPGEDINGPLESTLATDPGPSWSPSRGGLSVVLAALSNRLCLPSTHAWAGNWTGPPDVSALNARGVLLLSTRDLAFAGAVEYLGSRLASARRRLLVLDAVALERWPGDGPALSQYHVYVRAPARPDAQAVVRWPDSAVTEGLARAVFASSRTFGPASFARIETAFANLYPGEQPLCLCRGGNVAYTVCTRAGPKTRVPLSPREYRQYVLPGFDGCKDLARQSRGLGLGAADFVDEAAHSHRAANRWGLGAALRPVFLPEGRRPGAAGPEAGDVPTWARVFCRHALLEPDPAAEPLVLPPVAGRSVALYASADEARNALPPIPRVMWPPGFGAAETVLEGSDGTRFAFGHHGGSERPAETQAGRQRRTADDREHALEPDDWEVGCEDAWDSEEGGGDDGDAPGSSFGVSVVSVAPGVLRDRRVGXRPAVKVELLSSSSSSEDEDDVWGGRGGRSPPQSRG

SEQ ID NO: 7 - DNA, 8878 bp, Artificial
  plasmid
ttaattaaggccgcagcttcctagataacttcgtatagcatacattatacgaagttatggatctcccgcccagcgtcttgtcattggcgaactcgaacacgcagatgcagtcggggcggcgcggtcccaggtccacttcgcatattaaggtgacacgcgcggcctcgaacacagctgcaggccatgagcgaaaaatacatcgtcacctgggacatgttgcagatccatgcacgtaaactcgcaagccgactgatgccttctgaacaatggaaaggcattattgccgtaagccgtggcggtctggtaccgggtgcgttactggcgcgtgaactgggtattcgtcatgtcgataccgtttgtatttccagctacgatcacgacaaccagcgcgagcttaaagtgctgaaacgcgcagaaggcgatggcgaaggcttcatcgttattgatgacctggtggataccggtggtactgcggttgcgattcgtgaaatgtatccaaaagcgcactttgtcaccatcttcgcaaaaccggctggtcgtccgctggttgatgactatgttgttgatatcccgcaagatacctggattgaacagccgtgggatatgggcgtcgtattcgtcccgccaatctccggtcgctaaccggtagcggatcatctagacccgggtaccgttaacttgtttattgcagcttataatggttacaaataaagcaatagcatcacaaatttcacaaataaagcatttttttcactgcattctagttgtggtttgtccaaactcatcaatgtatcttatcatgtctggatccccattctcatgtttgacagcttatcatcgaatttctgccattcatccgcttattatcacttattcaggcgtagcaaccaggcgtttaagggcaccaataactgccttaaaaaaattacgccccgccctgccactcatcgcagtactgttgtaattcattaagcattctgccgacatggaagccatcacagacggcatgatgaacctgaatcgccagcggcatcagcaccttgtcgccttgcgtataatatttgcccatggtgaaaacgggggcgaagaagttgtccatattggccacgtttaaatcaaaactggtgaaactcacccagggattggctgagacgaaaaacatattctcaataaaccctttagggaaataggccaggttttcaccgtaacacgccacatcttgcgaatatatgtgtagaaactgccggaaatcgtcgtggtattcactccagagcgatgaaaacgtttcagtttgctcatggaaaacggtgtaacaagggtgaacactatcccatatcaccagctcaccgtctttcattgccatacggaattccggatgagcattcatcaggcgggcaagaatgtgaataaaggccggataaaacttgtgcttatttttctttacggtctttaaaaaggccgtaatatccagctgaacggtctggttataggtacattgagcaactgactgaaatgcctcaaaatgttctttacgatgccattgggatatatcaacggtggtatatccagtgatttttttctccattttagcttccttagctcctgaaaatctcgataactcaaaaaatacgcccggtagtgatcttatttcattatggtgaaagttggaacctcttacgtgccgatcaacgtctcattttcgccaaaagttggcccagggcttcccggtatcaacagggacaccaggatttatttattctgcgaagtgatcttccgtcacaggtatttattcgcgataagctcatggagcggcgtaaccgtcgcacaggaaggacagagaaagcgcggatctgggaagtgacggacagaacggtcaggacctggattggggaggcggttgccgccgctgctgctgacggtgtgacgttctctgttccggtcacaccacatacgttccgccattcctatgcgatgcacatgctgtatgccggtataccgctgaaagttctgcaaagcctgatgggacataagtccatcagttcaacggaagtctacacgaaggtttttgcgctggatgtggctgcccggcaccgggtgcagtttgcgatgccggagtctgatgcggttgcgatgctgaaacaattatcctgagaataaatgccttggcctttatatggaaatgtggaactgagtggatatgctgtttttgtctgttaaacagagaagctggctgttatccactgagaagcgaacgaaacagtcgggaaaatctcccattatcgtagagatccgcattattaatctcaggagcctgtgtagcgtttataggaagtagtgttctgtcatgatgcctgcaagcggtaacgaaaacgatttgaatatgccttcaggaacaatagaaatcttcgtgcggtgttacgttgaagtggagcggattatgtcagcaatggacagaacaacctaatgaacacagaaccatgatgtggtctgtccttttacagccagtaggctcgccgcagtcgagcgacggcgaagccctcgagtgagcgaggaagcaccagggaacagcacttatatattctgcttacacacgatgcctgaaaaaacttcccttggggttatccacttatccacggggatatttttataattattttttttatagtttttagatcttcttttttagagcgccttgtaggcctttatccatgctggttctagagaaggtgttgtgacaaattgccctttcagtgtgacaaatcaccctcaaatgacagtcctgtctgtgacaaattgcccttaaccctgtgacaaattgccctcagaagaagctgttttttcacaaagttatccctgcttattgactcttttttatttagtgtgacaatctaaaaacttgtcacacttcacatggatctgtcatggcggaaacagcggttatcaatcacaagaaacgtaaaaatagcccgcgaatcgtccagtcaaacgacctcactgaggcggcatatagtctctcccgggatcaaaaacgtatgctgtatctgttcgttgaccagatcagaaaatctgatggcaccctacaggaacatgacggtatctgcgagatccatgttgctaaatatgctgaaatattcggattgacctctgcggaagccagtaaggatatacggcaggcattgaagagtttcgcggggaaggaagtggttttttatcgccctgaagaggatgccggcgatgaaaaaggctatgaatcttttccttggtttatcaaacgtgcgcacagtccatccagagggctttacagtgtacatatcaacccatatctcattcccttctttatcgggttacagaaccggtttacgcagtttcggcttagtgaaacaaaagaaatcaccaatccgtatgccatgcgtttatacgaatccctgtgtcagtatcgtaagccggatggctcaggcatcgtctctctgaaaatcgactggatcatagagcgttaccagctgcctcaaagttaccagcgtatgcctgacttccgccgccgcttcctgcaggtctgtgttaatgagatcaacagcagaactccaatgcgcctctcatacattgagaaaaagaaaggccgccagacgactcatatcgtattttccttccgcgatatcacttccatgacgacaggatagtctgagggttatctgtcacagatttgagggtggttcgtcacatttgttctgacctactgagggtaatttgtcacagttttgctgtttccttcagcctgcatggattttctcatactttttgaactgtaatttttaaggaagccaaatttgagggcagtttgtcacagttgatttccttctctttcccttcgtcatgtgacctgatatcgggggttagttcgtcatcattgatgagggttgattatcacagtttattactctgaattggctatccgcgtgtgtacctctacctggagtttttcccacggtggatatttcttcttgcgctgagcgtaagagctatctgacagaacagttcttctttgcttcctcgccagttcgctcgctatgctcggttacacggctgcggcgagcgctagtgataataagtgactgaggtatgtgctcttcttatctccttttgtagtgttgctcttattttaaacaactttgcggttttttgatgactttgcgattttgttgttgctttgcagtaaattgcaagatttaataaaaaaacgcaaagcaatgattaaaggatgttcagaatgaaactcatggaaacacttaaccagtgcataaacgctggtcatgaaatgacgaaggctatcgccattgcacagtttaatgatgacagcccggaagcgaggaaaataacccggcgctggagaataggtgaagcagcggatttagttggggtttcttctcaggctatcagagatgccgagaaagcagggcgactaccgcacccggatatggaaattcgaggacgggttgagcaacgtgttggttatacaattgaacaaattaatcatatgcgtgatgtgtttggtacgcgattgcgacgtgctgaagacgtatttccaccggtgatcggggttgctgcccataaaggtggcgtttacaaaacctcagtttctgttcatcttgctcaggatctggctctgaaggggctacgtgttttgctcgtggaaggtaacgacccccagggaacagcctcaatgtatcacggatgggtaccagatcttcatattcatgcagaagacactctcctgcctttctatcttggggaaaaggacgatgtcacttatgcaataaagcccacttgctggccggggcttgacattattccttcctgtctggctctgcaccgtattgaaactgagttaatgggcaaatttgatgaaggtaaactgcccaccgatccacacctgatgctccgactggccattgaaactgttgctcatgactatgatgtcatagttattgacagcgcgcctaacctgggtatcggcacgattaatgtcgtatgtgctgctgatgtgctgattgttcccacgcctgctgagttgtttgactacacctccgcactgcagtttttcgatatgcttcgtgatctgctcaagaacgttgatcttaaagggttcgagcctgatgtacgtattttgcttaccaaatacagcaatagtaatggctctcagtccccgtggatggaggagcaaattcgggatgcctggggaagcatggttctaaaaaatgttgtacgtgaaacggatgaagttggtaaaggtcagatccggatgagaactgtttttgaacaggccattgatcaacgctcttcaactggtgcctggagaaatgctctttctatttgggaacctgtctgcaatgaaattttcgatcgtctgattaaaccacgctgggagattagataatgaagcgtgcgcctgttattccaaaacatacgctcaatactcaaccggttgaagatacttcgttatcgacaccagctgccccgatggtggattcgttaattgcgcgcgtaggagtaatggctcgcggtaatgccattactttgcctgtatgtggtcgggatgtgaagtttactcttgaagtgctccggggtgatagtgttgagaagacctctcgggtatggtcaggtaatgaacgtgaccaggagctgcttactgaggacgcactggatgatctcatcccttcttttctactgactggtcaacagacaccggcgttcggtcgaagagtatctggtgtcatagaaattgccgatgggagtcgccgtcgtaaagctgctgcacttaccgaaagtgattatcgtgttctggttggcgagctggatgatgagcagatggctgcattatccagattgggtaacgattatcgcccaacaagtgcttatgaacgtggtcagcgttatgcaagccgattgcagaatgaatttgctggaaatatttctgcgctggctgatgcggaaaatatttcacgtaagattattacccgctgtatcaacaccgccaaattgcctaaatcagttgttgctcttttttctcaccccggtgaactatctgcccggtcaggtgatgcacttcaaaaagcctttacagataaagaggaattacttaagcagcaggcatctaaccttcatgagcagaaaaaagctggggtgatatttgaagctgaagaagttatcactcttttaacttctgtgcttaaaacgtcatctgcatcaagaactagtttaagctcacgacatcagtttgctcctggagcgacagtattgtataagggcgataaaatggtgcttaacctggacaggtctcgtgttccaactgagtgtatagagaaaattgaggccattcttaaggaacttgaaaagccagcaccctgatgcgaccacgttttagtctacgtttatctgtctttacttaatgtcctttgttacaggccagaaagcataactggcctgaatattctctctgggcccactgttccacttgtatcgtcggtctgataatcagactgggaccacggtcccactcgtatcgtcggtctgattattagtctgggaccacggtcccactcgtatcgtcggtctgattattagtctgggaccacggtcccactcgtatcgtcggtctgataatcagactgggaccacggtcccactcgtatcgtcggtctgattattagtctgggaccatggtcccactcgtatcgtcggtctgattattagtctgggaccacggtcccactcgtatcgtcggtctgattattagtctggaaccacggtcccactcgtatcgtcggtctgattattagtctgggaccacggtcccactcgtatcgtcggtctgattattagtctgggaccacgatcccactcgtgttgtcggtctgattatcggtctgggaccacggtcccacttgtattgtcgatcagactatcagcgtgagactacgattccatcaatgcctgtcaagggcaagtattgacatgtcgtcgtaacctgtagaacggagtaacctcggtgtgcggttgtatgcctgctgtggattgctgctgtgtcctgcttatccacaacattttgcgcacggttatgtggacaaaatacctggttacccaggccgtgccggcacgttaaccgggctgcatccgatgcaagtgtgtcgctgtcgagtttaaacatgcatagttattaatagtaatcaattacggggtcattagttcatagcccatatatggagttccgcgttacataacttacggtaaatggcccgcctggctgaccgcccaacgacccccgcccattgacgtcaataatgacgtatgttcccatagtaacgccaatagggactttccattgacgtcaatgggtggagtatttacggtaaactgcccacttggcagtacatcaagtgtatcatatgccaagtacgccccctattgacgtcaatgacggtaaatggcccgcctggcattatgcccagtacatgaccttatgggactttcctacttggcagtacatctacgtattagtcatcgctattaccatggtgatgcggttttggcagtacatcaatgggcgtggatagcggtttgactcacggggatttccaagtctccaccccattgacgtcaatgggagtttgttttggcaccaaaatcaacgggactttccaaaatgtcgtaacaactccgccccattgacgcaaatgggcggtaggcgtgtacggtgggaggtctatataagcagagctggtttagtgaaccgtcagatccgctagcgctaccggtcgccaccatggtgagcaagggcgaggagctgttcaccggggtggtgcccatcctggtcgagctggacggcgacgtaaacggccacaagttcagcgtgtccggcgagggcgagggcgatgccacctacggcaagctgaccctgaagttcatctgcaccaccggcaagctgcccgtgccctggcccaccctcgtgaccaccctgacctacggcgtgcagtgcttcagccgctaccccgaccacatgaagcagcacgacttcttcaagtccgccatgcccgaaggctacgtccaggagcgcaccatcttcttcaaggacgacggcaactacaagacccgcgccgaggtgaagttcgagggcgacaccctggtgaaccgcatcgagctgaagggcatcgacttcaaggaggacggcaacatcctggggcacaagctggagtacaactacaacagccacaacgtctatatcatggccgacaagcagaagaacggcatcaaggtgaacttcaagatccgccacaacatcgaggacggcagcgtgcagctcgccgaccactaccagcagaacacccccatcggcgacggccccgtgctgctgcccgacaaccactacctgagcacccagtccgccctgagcaaagaccccaacgagaagcgcgatcacatggtcctgctggagttcgtgaccgccgccgggatcactctcggcatggacgagctgtacaagtccggactcagatccaccggatctagataactgatcataatcagccataccacatttgtagaggttttacttgctttaaaaaacctcccacacctccccctgaacctgaaacataaaatgaatgcaattgttgttgttaacttgtttattgcagcttataatggttacaaataaagcaatagcatcacaaatttcacaaataaagcatttttttcactgcattctagttgtggtttgtccaaactcatcaatgtatcttaaatggccgcataacttcgtatagcatacattatacgaagttatctagcagatctgaattcgatatcaagctgcggccttaattaa

SEQ ID NO: 8 - DNA, 124884 bp, Varicella zoster
  CDS (1134)..(1850)
  CDS (8607)..(9386)
  CDS (10642)..(10902)
  CDS (11009)..(11917)
  CDS (12160)..(13392)
  CDS (13590)..(16049)
  CDS (16214)..(18199)
  CDS (18441)..(19346)
  CDS (24149)..(25516)
  CDS (30759)..(33875)
  CDS (34083)..(42374)
  CDS (44506)..(46263)
  CDS (50857)..(54471)
  CDS (54651)..(56963)
  CDS (57008)..(59614)
  CDS (59766)..(60197)
  CDS (64807)..(65832)
  CDS (66074)..(68599)
  CDS (70633)..(71355)
  CDS (71540)..(75730)
  CDS (75847)..(76797)
  CDS (78170)..(80200)
  CDS (80360)..(81451)
  CDS (82719)..(83318)
  CDS (84667)..(86322)
  CDS (87881)..(90388)
  CDS (90493)..(92808)
  CDS (95996)..(98641)
  CDS (110581)..(111417)
  CDS (111565)..(112107)
  CDS (113037)..(114218)
  CDS (114496)..(115560)
  CDS (115808)..(117679)
  CDS (120764)..(124696)
aggccagccctctcgcggccccctcgagagagaaaaaaaaaagcgaccccacctccccgcgcgtttgcggggcgaccatcgggggggatgggattttttgccgggaaacccccccccgccagcctttaacaaaacccgcgccttttgcgtccacccctcgtttactgctcggatggcgaccgtgcactactcccgccgacctgggaccccgccggtcaccctcacgtcgtcccccagcatggatgacgttgcgacccccatcccctacctacccacatacgccgaggccgtggcagacgcgccccccccttacagaagccgcgagagtctggtgttctccccgcctctttttcctcacgtggagaatggcaccacccaacagtcttacgattgcctagactgcgcttatgatggaatccacagacttcagctggcttttctaagaattcgcaaatgctgtgtaccggcttttttaattctttttggtattctcacccttactgctgtcgtggtcgccattgttgccgtttttcccgaggaacctcccaactcaactacatgaaactactgtccggaaggggaaggtatttattctcgcttgcagcttgtcgcgcgtgtatgcacaacaaaagctatatatgtcaccaaagccaacgtcgccatctggagtactacacccagtacgttgcataacctgtccatttgcattttcagttgcgcggacgcctttctccgggatcgtggccttgggacatcaaccagtggaataagaaccgccggtggtcttgtttgaacgacgagtggcgacgcgttgttctgcataagctctgtatgctgatacataaacacagagtctgtatcgctatcagattcccgaacaccttccggtaccccatactccgataccctggacattgcggatcccaaaaatataatattaacaggatttgcttatactttgctacagcttatataaatttatgtgcgatacatcttaagtgcatccgtacgttatttatacattgcctgtcacgtgaaaagactgtgttacccaataaaggttctacaaaaaatgctttattgggtgtttgtttaatagctattatcgtaacccacccccgtaaaatcataaaatgcatgtaatttctgagacacttgcatatgggcatgttcccgcatttattatgggctccactctggtgcgtcccagtttaaacgccaccgccgaggaaaatcccgcgtcagaaacgcgatgtttattacgagtgcttgcggggagaactgtagacctgccaggcggaggaacgttacacattacctgtaccaaaacctatgtaattattggcaaatatagcaaacccggcgaacgtcttagccttgcccgtctaatagggcgtgcaatgacgcctggaggtgcaaggacatttattattttggcgatgaaggaaaagcgatccacaacgcttgggtatgaatgtggtacgggcttgcatttactggctccatctatgggtacatttctccgcacacacggtttaagtaacagagatctctgtttatggcggggtaatatttatgatatgcatatgcaacgtcttatgttttgggagaatatcgcgcaaaataccactgaaacaccttgtataacgtcgacgttaacatgcaacttgacagaagactctggtgaagccgcacttaccacgtcagaccgacccactctcccaaccctaacagcccaaggaagaccaacagtttccaacattcgtggaatattgaaaggatccccccgtcaacagccggtctgtcaccgggttagatttgccgaacctacggagggcgtattgatgtaatcactaaataaaatacaccttttttcgattgtacgtatttttatttaaatgtgtagttcatagtccgccgacagccgctcgggcttttcccccacatacaacatgatcgtatgcctcggatgcaccggtccaacactccgccgagaagggggatttacaatgacagtgatacccaatagccgccagatgtacacccagctgtccggactccagcatcatctgctgagttgcggcgctgaagggtgcatcgcatagggtgttataattagccatttccggtaacagtcgttgggaatttaggaggctgcaaaacggctgtaggtcaacatacattggggattcagatggtttatctcgacgtccaagtccaatcaaaaaagcgtgtaaatcatcagcccggccgcatgttgctcgaagagcacataacctcttaacaccgtacagaggggatggcgtcggtgcatgtgagttggcagggcatgtccacgttgtttccaacgccagtggcggtataacttgtgtaaacgacgccaacgggtcaggtttaagattcactcggatgggttgactgctttcggaagctcccgttgtatccattaattaaacgttcggtacacgtctggtgtgtgttttacccgaatcagagacggaattgcaaagatattggtttgaaagcaatgtaatcccgcccatatatccccaacgtcgccttaaaaactcccacaatattacatttttattagtcttttattaatatagaatcacataaacaattgataaaatcaaggggtggtgtataatgattaaaaatataaattgatatgttttacaagcatgaaataggtatttactattctaacaggtaaatatgcttaatgattaaaaatacaaattagtatgttttgacaagcatgaaaaaggtattttttattttagcagttaaaggtactacacttaaaatatttaccgtatggacgggcgtcagaaagatgcccggcccaagttgagagggtacattcaacacgaccacactcgcgttggtgggtgattagggcctctaaaacaccggccagacatgacccgggtgtatattcttgtaacacttgaacgttacaactgatatcatcatattccacaaatttagagccacggacaactatattagcaatgcgggcaatcataacaaacatataagtagtaatacacgtgatatcactaaaacgttgctggcgcaacagttcggggagagtacgagaccccaaatcgttgtccctgtttagaagaagacatcttacaaaaggccccagctttaactttaaattctccaaaagtgacttcgaggttgcaacaatgggattatttgtgtagatgggcaagttttttgccgctaacattttaatccacgttaacagttcatccgcagactccaacgcttcaatcaaagattctccacgtatgactctctcacgcaacgcgcgggcaatacgtgagtccattttatatgactcaaaggtacgataaagttcatgtccgtacaacatcaactccggccaagatgtgttttgttttatccccggaaaacatccaccggaagcccatgaatcaccctcttgtattgtggcatatcggactaccagtttttcaattgtttcatctaaatggcgtaccgagtcaatggtcacgctggctcccgcggtggagacgacttcaatagcacggcccgtaattcgatcgaccgggatatcatactcttttcgaatacgctctcggcgggcgtctctcttggaaaatcgcaacctgtacgattcgtcatgtgtctgatcatttctttctcccgtggtcattgcaggaggcgttgtaggacgccgtcttcgatttgacagggatcgatcacggtgttttcttgaactttgagtgttataagatctggatgatcgtcgatgtccccgttcgatgcgtgcatatccagtctccacgtctcttcctccatgatggtttgaatcgggtaatacaacaaccaaagttttcgggcgattgtggtggtagctttcacgccttccgtgccttcgtttggaataccgtggattatatgctgtatctgcagtacgctccacatacacagttctagacgttgtggagtcctcgcctggagtggagccaatagcttcatcatttgcccaatcggtgacttccaatgcaaagtcatccgaaggttcgtctggtagcaaattcataaagtcttcacaaatagtagacacgtctgggtcggttggaattgaagcagaggccatggctgcaaaatatctgacaattgcgtgtttgcagttgcctgtatcttccgccaatgttgtagaatttataggctcacccaaccccgcaatgggcgtgtttagtcacatgattaatgcttctgggagttttcactttccccaaacaagcttacctgcaccctttgttcgtaatgcataaaaataaccactgctatagcaaatatgacgatataaaaacattttatagcaaggccggacattactgtagcgcaacatgttgtgcatataccacgtattccccccgtattgatatgatttaaatgattatccttggttggttttggtctaacataagatataagctctactatagcgagcgtgcatacaacaacccaggccagaatccgaatgtatgtggggtataataacgcgcatggtgtatatgcaacgccaagcgttaaaagcacaatacatccagatgatatatgagcgataacctccaaaagcatcaataacgtaacacctttatgcatatataaaaaacttatagggtcagcattaaatactttactcataccatcccgtcgcatggaaacatcacataacaaccttgccaactttgtatatgggtaaccaagaagaatgttcgaaataacccgtgttacgtaattcagtgaatatgatgtgggggatattaactcacaggatgatcggaatggcccaaacatacgacgtattcgtcgaaattgtaaatacataccatatacaaaccatgcaaaaaaaatcatttttagctgcacgcaccaaaaataagcgtgacaattacgtgttcccagaacaattcgaattttgtcatgcaaaggtgtagaaatagcggtttttaccatagtatctcctgataatagattttcccggcagctgtaatcgtatccagataggccatccaaaaacgttgagtggtttacaaacgttacatatataagagagttgttataagacccccatacaaccggtccaccattaatcaccgtggttgcatacacacactcatgttcaaactttacacgagcggtataccatagggtaaaaacagcatgtccgctaagtagacacataattataaaatgttctgtcttgattcctaaagcctgcatgacccgtggaagatggcaattcaagcacgatgtagtatcacacggttggtgttaactcgaagttaaatttggataattaggtacttctagagtaaagattgtatgcatgcgattgctatcgcactttgtagcaaaacattgttgtgcaagcgaaatacacaaacggttgtgatgatccactcgcagagacacaaatgtccggggagccgttcttcctccgcgatggggatatcgaagacaagtgaacccttttgttccgcatatgagctgaaataacacccagtcccttttgatggcgatacactttgatgatgttaaggtatattcgcgatcacgcccggggaaatgaacagcaatatgctccacaatagattctaatattgtgctgtcgacaaaggcctccagtgtaaatgcgtccagacaagttaccccgcgctcttttagagcctttgttaaagatatttgcggggagctaaatatttgtttattacgcgcaaccttacgttcaaaaaactctgcgtattcccccccaaggttatgtaaaataaattgcactggaacattcgactgcggtcttgaatgaaaatgaaagtttgccgggtttctatgtgatgtcacaaacgctaatatatcaatacactgctcaggtacaacataaaatgggagtagttgtccaaccgccgtccctgtggttgttactttggagaaaaaaggcagtcttaaactatgtccgtggctataaacaccagtatctataaacgaaaagtcccgtaaatacggaccaatatattcaacaaattcccgttccagcaacaccgcttgctgtaatatttgtgcaaacccctttaaagtggaagaccccactaacgcatagggatttgggattggtacgcataccctgaaacctattttctctttacagttacagggtagagtttcatgcaagttttcattgtttgatacatcggcgtgtgtatggacttcagacgttgtctgtgtatcaaaaaaccatacatcctctgtataattctcttctacacacgtgtataattcgccattttctatgtaaaaatcgatgtcagaatggctggttatatccaataaattatcatcatccaacacctcaacggtaggttcaggacatgcagttttataaaaataacatgggtctttgttagggtttaccacggcctttggaaaaagtaattgcatggccgttaaaataccatgacgaaatgctcgcatgccggcatgtaaaatacccaatgggatgggttttcttatatgaaagtctacatcaagtatgaggtttgtgattataagatttgtattaaatagctcattcctgtttatataaagctgatctttgggtatgtttgatgaaattttagaaacgtttttaacagacgtagataatagtaaagtcaactgcatatctcgtagtgaagcggcaacaaaattacatggattaatttgtttaaggtcctccgcaattaatcgagcctcgtgcggtaaagtgtaacggtttgttattgatgaccacgtatcattagcaataacagcaaatgcttgggcgccgtgaggcaaggctacccgatatacaggcattggtccagttacctcagaatggccgatgagggcttctaatggagttttataactcaggatggatacatcatgtgtggctatcccagtggcagcagagaaaaacagtaatagttttgtaatccccgggctcgtatcaaaaccagtacgaccactttggttaggtgtatcgtttgcaaagttggctgctcgtaacgcctccgcggaaacacccgaatcctcaaaattagacaattcgtcaaaaccgggtggatttgagggaatagtggaggaccatccatatggactaaattgtttttcaatgttttccacacgacgagttagcgttgtagctaggtcacatacgcctataaacttgctaggttttgcggcatacgtaagacttaaagtatatgttttagtaattgtatatttatgtccaatctcaggtccaagttcagtgacatcacaaattacgttcttttttatatagtcacgcatgttgagacgagaacgtacatgattaaaaaaattagcagtagctctttttcccaggttggatgattttaagaggaccggtttattcacaaaatctgagtatgtaaccgcttgtaggtggtctgcgatctgtttccgattgaaacattcaaaatgtgccagataaatataatcaacaaattcacggtctggaactttaaggccttttctatcgttggtaatatactccgatactgcgtgtatttccgttgtgtctgtatgtattcgctgtaaaatgtacgatagagcatttttggctgtcaaacctcgtgtatatgttgaggaacaacaaaacatggaaagtttatcaaaagacaacaagtccgaaatattgtacccactacaattaggtaatgccgggacttggtaagttaaaaacaaatctttaattgcctgtaagtcatataagggggtttccaacgtattgtaacttgtgtccgtttgtaacaagtaatagcgtgtagccaacactagcgttttttcagagggtccaaatcgaacaatataccaaaacggcgagcatccatacccccagtagagtcgtcgatatgcagccaatacttgacgttcgtaatgggcatataatgatgttagctcctgacgaccaacggattttttaactaacttgcagagtgttgcctctgtgatgcataggccgttgtccgataatccctttcggtttaaatggtgtgttgttaccatcagagtttgtataacttccgagtgaatgtcaaacgtctccgatatacatagggtatcagatattatatgcggatttaggggtgctccataccataacgccttatataaagctttaaaatcagtttgggttttaaaacaacaaaaaaatataggccagacccgggatcgtacatctccagttgaaaatccaccaattaaataaaaaataacgttgacgtccctactacaaaataaatgcattatttggttttcttcatcgttttcagttacttcacgtgggcgtttagttgggattacttgcgtgatctcttccctcccatttttgacaaagacgtcatctaagtcgggagtccaagtataactcaccacatacagaggttctgtgcttatctgcccggtaagcaacaacagcgagtgggagattgcacatccctttgtggcaaataataaccgaatcgtcggtttggaggatttatccatagttcaatacgttggaaagccagtcaatcatgcagacggtgtgtgccagcttatgtggatatgctcgaataccaactgaagagccatcttatgaagaggtgcgtgtaaacacgcacccccaaggagccgccctgctccgcctccaagaggctttaaccgctgtgaatggattattgcctgcacctctaacgttagaagacgtagtcgcttctgcagataatacccgtcgtttggtccgcgcccaggctttggcgcgaacttacgctgcatgttctcgtaacattgaatgtttaaaacagcaccattttactgaagataaccccggtcttaacgccgtggtccgttcacacatggaaaactcaaaacggcttgctgatatgtgtttagctgcaattacccatttgtatttatcggttggcgcggtggatgttactacggatgatattgtcgatcaaaccctgagaatgaccgctgaaagtgaagtggtcatgtctgatgttgttcttttggagaaaactcttggggtcgttgctaaacctcaggcatcgtttgatgtttcccacaaccatgaattatctatagctaaaggggaaaatgtgggtttaaaaacatcacctattaaatcggaggcgacacaattatctgaaattaaacccccacttatagaagtatcggataataacacatctaacctaacaaaaaaaacgtatccgacagaaactcttcagcccgtgttgaccccaaaacagacgcaagatgtacaacgcacaacccccgcgatcaagaaatcccatgttatgcttgtataaatattgaaataaaaactaaaaacgtttctggtgtatgtttttattttgtatataaaattaaaacattgctggctggcgtggttattacatttaatgttttagtagaaaatcgacatcgtttgtttctttatcagttgaaccaaatccacgcgttccccgttcgctgggtgtggctattagatctaacgttttagtaaaataccattgtacacccggtatgccacatttaccgcggatagcataaggaaatgcaatattacttaaaacgttgtgttttaagtgtatttgggtgttgtgatctattaacaggacctgtgcaagacgatctcccgtttttatacgtatgtcatcacccgtgagattatatacgtagaatttacagtgttctcctgcaggccatgccgttggacacacgataatgcctgatcggcttttcgatgatcttccaaaaatataagcgtttatactcggatgttgtaagtcccagtctcttataatcggtaagacaatttttataaattcattcctttttaaatataggttatatggtacacaaatatcatatcccgcgtcttcttggcgttttggattgatgatatgtttgtaggttaagggaacatcgatatggtattctgcagaatccctatgtaaaggttgcccctgctgtaccgtggaaatatcagcaaattcaggtataacgggtttttcataatttgacggcgagtttgataagggttgaacttgtatcgatttaaaaattggatccagatgtttaagaacgttttttgggagaaggcgactttgtcttaattttaccgggaacaagtagattgttaaatgtccgggtaaaataacggttactcctggccggtaatacaaaagggctgaaattactcctctgtaacccgcatcaataactccgttggcgacaaaaaaattgtcttcatcagcaagggcagtatctttgcattgaattaacaacagtgcgtattcattgggaggcgccgacttaaccaacagctccaactgctgcatataaaaaccgccccgtgttacagatttttcagatggcagttcgagtttcttgtggttccggagtaacaacggttgatgtcgacttactttatcgtctaacacgcattgcagcgtatctgcacattcaggttgaacttctattaaaattgtatcttttaaacaccgattcggaatagtttggctacaaaacatatcacctgtatttactgccgtttccaagatgggatcaattaccgcttcgttcatattaataacgatgcaaattttatttttttgtgaagacagcagtggggagccaaactttgcagaacggaatttttggcatgccagctgttcggctcgtggagtttatatcgacggatcaatgatcaccacccttttcttctacgcatcccttttgggggtgtgtgtagcccttatttcgttagcttatcatgcgtgtttccggttatttactcgttctgtattacgcagcacgtggtaaacccgtttgcctataaaaggggcaggcgtgtataagagggcccctgtttaatacgcggtctgccgtgtttggatatttcacgaccctatcgtttatttacgtaatggcatcttccgacggtgacagactttgtcgctctaatgcagtgcgtcgtaaaacaacgcctagttattccggacaatatcgaaccgcgcggcgaagtgtggtcgtaggaccccccgatgattcagacgactcgttgggttacattaccacagttggggccgattctccttctccagtgtacgcggatctttattttgaacataaaaatacgacccctcgcgtacatcaaccaaacgactccagcggatcggaagatgactttgaagacatcgatgaagtagtggccgcctttcgggaggcccgtttgagacatgaactggttgaagatgctgtatatgaaaacccgctaagtgtagaaaaaccatctagatcttttactaaaaatgcggcggttaaacctaaattagaggattcaccgaagcgagctcccccgggagcaggcgcaattgccagcgggagaccaatttccttcagcactgcaccaaaaaccgcaacaagctcgtggtgcggtcctacgccatcatataacaaacgcgtcttttgtgaagcggtccggcgcgtagccgccatgcaggcacaaaaggctgccgaagcggcttggaatagtaatcccccaaggaataacgccgaattagaccgtttgttaaccggagccgttattcgtattacggtgcatgagggtttaaatttaatacaagccgctaatgaagcagacctaggtgaaggagcatcggtatccaaacgtggacataatcgaaaaactggagatttacaggggggcatgggtaatgaacctatgtacgcacaagttcgtaagccaaaaagtcgaacggatacacaaacgactgggcgtataactaatcgaagtagggcccgttctgcatcaagaactgatacgcgaaaatagggatataattacgcagtaacggtttacccggtattatgtataataaataaacgtataaaagacagtcgtggtttgtgtttattataaatgtgtattatatgtcacatattataaactgtttaaatagtaccacgtggtattatgaacagtttataatcagttgctaccaaacaaaccccattagacggcgggttttgataaagggaatcgcttatttaaactaaagattttactctataagtatggagtgtaatttaggaaccgaacatcctagtacagatacgtggaatcgtagtaaaacggaacaagcggttgtggacgcatttgatgaatcgttgtttggtgatgtagcatcggatattggatttgaaacgtcgttatattcacatgcagttaaaactgctccgtctccgccttgggtagctagccctaaaattttatatcaacagttaatacgggatcttgatttttcagaagggccgcgtttactatcatgtcttgaaacctggaacgaggatttattctcatgttttcctattaatgaggacctatattccgatatgatggttttatccccggatccagatgacgttatctcaaccgtttcaaccaaagaccatgttgaaatgtttaatttaacaacccggggttccgttcgattgcctagtccaccaaagcaaccgacggggcttccagcttacgttcaggaggtccaggattcgtttaccgtagaactacgcgcccgggaagaagcatacacaaaactactagttacttattgtaaatcgattatacgttatctccaaggaacggcgaaaaggacgacaataggtcttaatatacaaaaccctgaccagaaagcttacacgcaactcaggcaaagtattctacttagatattatcgtgaggtggcaagtttggcgcgtcttctgtacctacatttatatttaaccgtaacgcgtgaattttcctggcgtttgtacgccagtcaatctgcacacccggacgtgtttgcggctttaaaattcacctggaccgaacgtcgacagttcacgtgtgcgtttcatcctgtattatgcaaccacggcattgtgttattagaagggaaaccactaacagcgtctgccttgagggaaataaattaccgccgccgagaactgggactgcctctagttagatgtggtcttgttgaagaaaacaaatctccgttggttcaacaaccctcattttcggttcatttaccacggtcggtgggttttcttacccaccacattaagcgtaagttagacgcatatgcggtcaaacatcctcaagaaccgagacatgtacgagcggatcatccttacgcaaaagttgttgaaaatagaaactacggtagtagcatcgaagctatgattttagcacctccgtccccatccgagatcctgccgggggacccaccacgcccacccacgtgtgggtttttaacgcgttaaacgtcattggggtagagggtgtaaataaattacgaaaacgtgcatgcgttttttatttttacaatgcgccgtatatggtatgtctgtcatgtgctctaaagtcccatatataaaagaagccccaacgagtgtatgcgtattgcgtaccgcgaccctgggatgttttacaggcgcgtttgtttgtctcggttataagtatgcagtcgggtcattataaccggaggcaatcccgccgacagcggatatcgtctaataccacagactccccccgtcacacacacggaacacgttatcggtcaaccaattggtatacacacccaccccagatattgtccaattcagaaacattagttgcggttcaagaactactgaactccgagatggatcaggacagcagttctgacgcatcggatgattttccgggatacgccttacatcattctacatataatggatccgaacaaaatacatcaacttccagacatgaaaatcgcatatttaaattaacggagagggaagctaatgaggaaatcaacatcaatacggacgcgatcgacgacgagggagaggcggaggagggagaggcggaggaggacgcgatcgacgacgagggagaggcggaggagggagaggcggaggaggacgcgattgacgacgagggagaggcggaggagggagaggcggaggaggacgcgattgacgacgagggagaggcggaggagggagaggcggaggagggagaggcggaggagggagaggcggaggaggacgcgatcgacgacgagggagaggcggaggaggacgcggcggaggaggacgcgatcgacgacgagggagaggcggaggaggattatttttctgtaagtcaagtttgcagtcgagacgcggatgaggtttattttacgttagacccggaaataagttacagtaccgatcttcgcattgcaaaggttatggagcctgcggtatcaaaggaacttaatgtatcaaaacgttgtgttgaacctgttaccctaacaggctctatgttagcgcataatgggtttgatgagtcctggtttgctatgcgcgaatgtacccgtcgcgaatatattacggtccaaggattatacgacccaattcatttacggtatcagtttgatacttcccggatgacacccccacagattttgagaactataccagcccttcctaacatgacacttggtgaacttttattgatttttcctattgaatttatggcccagccaatttctatagaacgtattttagttgaagatgtatttttagataggcgggcttccagtaaaacacataaatacggcccgcgttggaattccgtctacgcacttccatataatgcgggtaaaatgtatgtacaacacattcctgggttttatgacgtgtccttacgtgctgtgggccaaggaacggccatttggcatcacatgatattatccacagcagcatgcgctatttctaatcgcatttcacatggagatggattaggatttttgttagacgcggcaattcgtattagcgcaaactgtatttttttgggacgtaacgataattttggcgtgggggatccatgttggttagaagaccatcttgccggattaccacgagaagccgtacccgacgtactccaagtgacacagttggttttgccaaatcggggtccaacggttgccattatgcgtggtttttttggggcgttggcatattggcccgaactaagaattgctataagtgaaccatctacatctttggtgcgatatgctaccggtcacatggaacttgccgaatggtttttattttcacgtacacatagtttaaagccacaatttaccccaacggaacgggaaatgttagcgtcattttttacgttgtatgttactcttggtggaggaatgttgaactggatctgtagagcaactgcaatgtatttagctgctccttaccattcccgttcggcttacatcgcggtctgtgaatctctgccctattactatatcccggttaatagtgacctgttatgtgatttagaggtattactgttaggcgaggtcgacctcccaactgtttgtgaatcctacgcaactattgcacacgaattaaccggatatgaggctgttcgcacagcagccacaaattttatgatagagtttgccgattgttataaggaaagtgagaccgatttaatggtaagcgcgtacctgggggccgttttattgttacaacgggtgttgggtcatgcaaatcttcttttgttgcttctctccggtgctgcgttgtacggaggatgttcaatttacatcccccgaggtattttagatgcatataatactttaatgttggcagcaagtcctctttacgctcaccaaactttaacatccttttggaaagaccgcgatgatgcaatgcaaactttggggattcgaccgacaacggacgttttacccaaagagcaagacaggatagttcaggcatcacctatagagatgaacttccgttttgtgggattggagaccatctatccccgagaacagcccattccctccgtggacctagccgaaaatcttatgcaatacaggaatgaaattctgggtttggattggaaaagcgtagccatgcatttactacgaaaatattaagggttgtgatttttttcattaggatgaaaagaacgtttcctagccacacccacaaaggagtttgtaaaataaaatctctgtttagaccttaaaatttgttgtgtgtgttgtgtggggggtccgtgaggatcgacctttacaagatataatttgtccatatcgcaatgttttctcggtttgcgcgttccttttccagcgatgatagaacgcgtaaatcttatgatggtagttaccaaagttttaatgccggcgaacgtgatttgcccacacctacccgggactggtgttctatttcccaacgcataaccagcgagcgcgtgagggatggatgtcttattccaacgcccggcgaggctttggagacggcggtaaaggctttatctgaaaagaccgacagcctaacatcgccggttttacaaagtaccgaaagacacagtgttctgcttggattacaccataataatgttcctgaatcgttggtggtctcgtgtatgtctaacgatgttcatgacgggtttatgcagcgttatatggaaacaattcaaagatgtttggatgacctgaaactttctggggatggactttggtgggtttatgaaaatacatattggcagtatctcaaatacaccacaggagccgaggtaccggtgacttcagagaaggtaaataaaaagtctaaatccacggttttgttgttttcatccgtagttgccaataaaccaatatccagacatccttttaaatctaaagttataaattcggattaccggggaatatgtcaggagctacgtgaggcgttaggagctgtgcaaaagtatatgtattttatgcgtccagatgatcctacaaaccccagcccggatacaagaatacgtgtacaagaaattgcggcttacacggctactggctacgggtggatgttatggttcttggacgttgtggacgccagggtatgtcgccatctcaaacttcaatttcgacggattcgagggccgcgcgcgtctgttattccagatgatttgcttagacgacatttaaaaacgggtcctgcggtctcagcgggcacaggagttgcgtttattttagcagcaacaactgccagcgctcttactgcgcttttgcgtattagtgtattatggcgaaaggaagagtggcgggatggtttaaatggaaccgcagctgcaattgttgcggcggttgaacttattacgcttttgcaccaccattttcaatacttaattaatatgatgcttattggatatgcatgttggggggatgggggattaaacgatccttatatattaaaggcgctacgtgcccagggacggtttttatattttgcgggtcagttggtcagaacaatgtcaacacacagttgggttgtgttagagaccagcacccatatgtggttttcccgggccgtggcgcagagtattttagcacatgggggtaaacccacaaagtattatgctcaggttcttgccgccagtaaacggtatactccgttacatttaagacgtatatccgaaccatcgagtgtgtctgatcagccgtatattcgttttaatcgactgggatctccaatagggacaggtatagggaatttggaatgtgtctgtttaacgggaaattatttatctgacgacgtaaatgcaagttcgcatgtaattaatacagaagcaccgttaaacagtatagcacccgatacaaatagacagcggacttctcgcgttttagttcgtccagacacgggtttggatgtaactgtccgaaaaaaccactgtctggacataggccatacggacggtagtccagttgacccaacgtatcctgatcattacacccggataaaggcggaatatgaaggtccggttcgggatgaatcaaacacaatgtttgaccaaagatcggatttacgtcacatagaaacccaagcatctttaaatgatcacgtatatgaaaatataccacccaaggaagtgggttttaactcatcttcagacctggatgtggatagccttaacgggtacacctccggagacatgcatacagacgatgacttatcaccagattttatacccaacgacgttcccgttagatgtaaaaccacggttacgtttaggaaaaatacgcctaagagtcatcattaagtacagcggttaatagatagttatggactaggcactttggcggtcatttccacaaccaggttaaaattgggggatttgggagaaaatagtctattgcgtattttctgttcaataattggactgcgttatttaaaggtctgattggttgattgggttataaaaggaattactcctttaaattttacttaatgtacccacaatatcaagtggtcgtttgtatttaacgattattaccggtaccatgggagacttgtcatgttggacaaaggtgccgggttttacgttaaccggcgaacttcagtacttaaaacaagtggatgatattttaaggtatggagttcggaaacgcgatcgaacaggaatcggaacgttatctttatttggaatgcaagctcgatacaatttgcgaaatgaatttcctcttttaactacaaagcgtgttttttggagggccgtcgtggaagagttgttatggtttatccgcgggtcaaccgattccaaagaactcgccgctaaagatatacacatatgggatatatacggatcgagcaaatttctaaataggaatggcttccataaaagacacacgggggaccttggccccatttacggcttccagtggagacattttggagcggaatataaagactgtcaatcaaactatttacagcaaggaatcgatcagctgcaaactgttatagatacaattaaaacaaacccagaaagccgacgaatgattatatcgtcttggaatccaaaggatatccccttaatggtactacctccatgtcacacgttatgtcagttttacgttgcaaacggtgaattatcctgccaagtataccagagatcgggggatatgggccttggggtaccgttcaacattgctggatatgcacttcttacctacatagtagcgcatgttacaggacttaaaaccggagatttaattcatacaatgggggatgcacatatttacttgaatcatatagatgctttaaaagtgcagctagctcgatccccaaaaccttttccttgccttaaaattattcgaaatgtaacagatataaacgactttaaatgggacgattttcagcttgatggatataatccacacccccccctaaaaatggaaatggctctttaatggatttttaaatgttgtcaagacagtagatgtgttgcgaatgtaataaaatgatatacacagacgcgtttggttggtttctgtttatgaacagcaacggatgcatagggttgcgataactgcgataagacccaatgtcccaaggatagatatcacaccaattataactgctacaacggaaaatgtagtggcgtaggtagatgcatcgtaggtataaacggccgaaaacggagggaattttttagggtaaccatctagatgacacgaataggtgataggtccgtcgagttccgatgttggacaagaactttgcatgtttacaaaccgtttgttttgatcacacaccccagtaatctcactgttttcgtggttaatgggagaatcgttaacccaccatacgaaatgtacaacgccacgtggcacacattttgccgtacatactatgtgtccatcaataatacctatagacacgttgggaaatggatagacgtcaggggtaacgacagcagaatatttcatattagagacgccatcccgaatccataaaacattacattggatggctgggggtgggtaatccatttgtttttgctgtggaattcgtaccgccgaaacataactaaataatccattggcatattcttgtattgcatcggttataaaattttttccgatgttaccaaaccttgaagtccaccgaacacgtaccgagtgcggtggataatactttgatacgttacagtaggctgcgtatgtctgtccggttaagactggatcgccgacaacggtaatatttggacgataatacgttgtaactgtaatactgtgttccgatatgacgttcttagtttttgtattaacgactcgccaaatatacgttccctccgtggtagcatccatagataaaattgttacagaaaaatcagacgttgttttaacatctggtattacataattttccttagcgtgtgtaaatatctcagggttgtttattaagtttaaatcggcactgttgctatataacataaccggtaaatctggcatgcgtattaacgcattgcccagttgacggtgcggatctataaggtgacgcgtaaaccaaacttcaatatgaagatcggggcgtataagcgacttccaccttgttatatttgaaccttccggatctaaagaatattgttcatatgttttttgttgctgcttaaaggccgcctgttgtccggtcgttagacgcatgtaacaaggcatgataaatgtgtgaaaatagggtatggattgtattccgccgtgaacgcattgtatattttcatatagaaaaggtggttgtgaatgttgggtgttggctgcgggatcgggctttcgggaagcggccgaggtgggcgcgacggcgggatcgggctttcgggtagcggccgaggtgggcgcgacggcgggatcgggctttcgggaagcggccgaggtgggcgcgacggcgggatcgggctttcgggtagcggccgaggtgggcgcgacggcgggatcgggctttcgggaagcggccgaggtgggcgcgacggcgggatcgggctttcgggaagcggccgaggtgggcgcgacggcgggatcgggctttcgggaagcggccgaggtgggcgcgacggcgggatcgggctttcgggtagcggccgaggtatataattcagttatacttacgggtgtgggttgagattcagtcgataattgtatacacgcgatcgttaaaattaaatttatttgtatccgcttcatcctggtttttattgacacatccacgctccccttaaataaaagattaaaacacccaccgcggaatttaaatgatggaaacgtttttttcgacattgggaataataaaaacggcttttgcaactttaaaaactttatttatctcgattacgatacatatgtaccacatagatagcatagatttattataatataaacacacacgtgatatactttagtgatatgagatgccataaaacagtcaataggtttaacgcttagtctcatcatctgaatacacgtcaaacccgccgcaactgttgatgttagaattataatagctccccatgaaatgccggcaaatgttacagctatacccgtcaccgaggtcgttgtatataatacaattacccataggttttttttttcttgatataaaacggcaaaaccctgtaacccaaatgctataatatgacctcctattgaaactgctaacgttacttgtgtaagtttgataaaatgatttaatttaattatatgtgagattgcccacattaatggggtaactatatataacaccgggggtataacagacattatacgaattcctttaaacacgcgtttaagggtccgggaactttctcgatggtcacatactctcccgcggtcattttgtgtatatacaacggcaaaacctaaatctgtataagtgtttaattgcttatggcgatttttacgatatatacacgtatcttgcaaatcggtggcggcatcgacaattgaaactagtgtgacaatagatatacacaatccaataagaacctcatatttactgacatacatatataaaataacggttagtaaacctcccaacccagttcccaacatcataacataaaaataaatatgcggtccattgaatgtcgtaacaaagttgtagtaatggatatgcacagcagccactgttccggtaatcgcggatatggaaattcccagtaattctacaaatggaagatcccgggatattgggcaaccaaccgcccataacacagcaaaacccaacacgaccaccgtctgcaaacatcgtcccaattttgctaatgtgcgtagaaatttcacggatgttggccataaccccgaaacgacgatcaaccccataatagttgcattgacggcagcttcgcagacgtgatattgtaaaattaacccggacgtgataacgcttgcttgtagtcccacgagaaacaaccgcgatgctgaggttattgcacacgaattacattcttgagggtttccgacacatccttggattgattgagcgcggattaattctctgtctaacacacccaggttttcatcatggacagctctttcaccattcacggccatgtcttaagtttaataattcaaaacaaataaaaatgtgttcatctatggtacacacaagtttgtatgtaaaatataagcaaaagttgcacttatttaactgtacatattacgtcagattcacgtgataattcagaataatccagggttcctgcagggtccactggaggagccacacaatattcgcgaattccgattccctcctgccatgtggtttcggggagtttcccccccattttatttccggtatttttttcgtttctttttgttaataaattgcgtcttttttttaatggtggttcatccttcacagattccatgttcgcaaataattgcatcgaggttaatttttctttaaggtctttgggacttaagaacgttgcataaaaaaaagaatgcacgggtgcggaacgttggatatacaatccaaccatgggggagttagttaaggcgagataaaaattaatataacacgtctcatcccgtgttaacttaagattttgtacggcagaacggaatccactgtgtgtttccaataatactccaaattcacgcatactcccgctgccataaacaacattattaaggatcctttttgaatttgtgattgagcgtattaaattatatggtgtaggcttgcttccgtttatatccaaggaaacattaaatgagataaaaccacccccggcggtctggatgtacatatccgtggctgttagaatgaagcatgttgtaaacccaaaagttttaagtagtcgctgtaaacgggtgaattgatcgcgttttaagcaaatgcttatatctggagttagatttggaaacatcattgtataacaagcgagttcacgttttacaacttgtttgtaacattgtacttgatcatctggaccacaatcacccgggcgttgccataccatcgtttggataatactccgctcggggggttgtccggtaaatttaaaatataaccgtgttggggtcgacggatcttttgtatggcgaaacgcgtcaataagcgaggaccgtccctccgttgccgcgagtacaaccattctcggcccagtccaattatactggtcaaacatatttgccggtataggaatatacagttgttctgtttccaaactacagtgaataattaatccttcgtcgctgaatattaaaatagaatcccttagtctattaaccagaggtgatatagacgaaattaaaccagtaagcgttttttccgttaaaacagctctggcgatttctggggcgtcaaaacccgcatgcaattccatgtccaaagcatcgtctgtacgcgacctcaaatccataatttactacttaaaatgtttactatagaaaaagtaatcatatgtaaacacacgagtttcgttaatatgtttgtttaacccgatccggtgacttaagtacataaacaggcatgatatttgaatagtacggcccatgggagggaacatttccacgtgttccaatacagggggtgttccttaatagggactgtgcaataaaatacgtaagaagttaccagatttgatgtaatgtttgtcataaaaaatatgtacatcattatatacgtctgtaattaacacaagatcacatcgaagaattactgaagccgctgtgaaacctttcacaagacgatataaacttggttaagtgtattgatggggctctttggactgacacgctttatccatgaacataaactggttaaacccagcatcatttcaacgccacccggagttttaacccccgtggcggtagacgtatggaacgtcatgtacacattgttggaacgtttataccctgtgggtaaacgcgagaatttacacggaccatctgtaacgatacattgtcttggagtcttattgcggctattaacacaacggtcatactatccgatatttgtattggaacgttgtacagacggcccattatcacgtggagccaaggcaattatgtcacgggccatgaaccacgatgaaaggggaacctcggacttaacccgtgttctactatcatccaacacatcatgttctatcaagtataacaaaacatcggaaacatatgacagtgtgtttcgaaactcttccacgagttgtattcctagcgaagaaaacaaatcccaggatatgtttttggacggttgtccacgacaaactgacaagacgatctgcctgcgcgaccaaaacgtatgcagtcttacctctacaatgccatcccgaggacatcctaaccatcgattatatcacaaattgtgtgcaagtcttattagatggatggggtatgcatacgtcgaggcggttgacattgaggcggacgaggcatgtgcaaacttatttcatacgcgtacagtggctttggtttatacgacagatactgatttactcttcatgggctgtgatattttgttagatgcaattcctatgtttgctccagtagtacgatgtcgcgatttgcttcaatatttaggaattacataccctgaatttttggttgcctttgttcgctgtcagaccgatttgcatacaagtgacaacctaaaatctgttcagcaagttattcaggataccggcctgaaagttccacatcaaatggacacttcaacgcgctcccccacttacgactcgtggagacatggcgaggttttcaaaagtcttaccgtagccacgtcgggtaaaacagaaaacggagtgtccgtttccaaatatgcatctaaccgatcggaggtgacagtagacgccagttgggctttaaaccttctgccaccctcatcctccccattggataatttggaacgcgcatttgttgaacatataatcgccgtggtaactccattgacccgcggtcgcctaaagttaatgaaacgtgtaaatattatgcaaaatacggcagacccatatatggttattaacaccttatatcataacttaaagggggaaaaaatggctcgccaatacgcacgtatttttaaacagtttattcctactccactcccactaaacactgtattaacaaaatattggaattaaaacacacataagagcgacttaatggttcattgttttattttgctcgtatatacatgttataaatcgtttatcactgtgcccgcataagatgtactgtgtctctcaaaaaaatttgtgtttttatctgcaatcataaatgcaagtggaaagtccgaatcgggaggtggggtgttaaatagttttggtacattaatcgctgataaaagcctgtccgcgctgaatttcacgtattgtgtaattgcatcgacgttcaccaaacgggttttgggtgcatgggattttaaaaacgcacactcgatttcaacggcttccgaaaacagttgatgtattctggtgatagcgggtttttcgggtacatagttattgtatatacaacacgatgcgctggtatgtatggcttcatctcggcttataaggtcgttaaattgacaagttacaacaaatagtccgttattgcgtaaatatgcaatagccgcgaacgatgatacaaaaaaaatgccctctataagaatcattagtatatatttttctgcaacggatgggttgtcccgtaccttttcttccaaccattgtactttttgttggatcgacggattattaatagtgacatttacgtattgtacccgcaacgattcatcccctctgaacaacattagttgaatttgactatagacacgcgcgtggacaacctcgatgcactcttgttcaatgtagtaatggtgaatatccttttgggaaaagagttgggttagagagcccaaattaacatttaccagatcatctgccgccgataaaaatgtaaaaataaatctgtagaatattagttcatcttccgttaaacagtccaagtattgataatcatcttcaatgataaaatcgctttctaaccaacgattcgaaatgctcagggcacgtaaattgtttatatctggacactccggcctgtaaaaaaaatgactgcaatctttctgatccattttggaatagtttcccgtgtaaatttataaagcacaactggtacaggttaattcgcctcccgcaaacagtccgctgttcgtagctttacgaattttacagtagtacatacccgttttaaggccggctttataggcacgtataagcaaattcattattttggaggcgggaattgtcccgtctgggcgttcctcaataaataaagtcattgattgactttggtcaataaatggcgccctttctgcacacatatcaacgagatcctcttgctcatattcaaacgctgttttatattttaagagtgggtgactattagataaacagccaaacgaacgtattactgaccattggtttttctcaagtatgtttataacttccagtcgtttttcttcacatgaatacatatctcttagttcgtccataaggtctaagttgggtctaagtaactcacccgaggtggtgaccttactaaacatattattataaattggagagaaaccctcactgcactccgttacctgtgcagatgaaactgtgggcattaacgctaagaactgcgagttgtataacccataagcgcaaatatcatctcgcagggtacaccatggtaaatctaaataacttatcgtagaaaacccatcttggtgtaaccatcccttagcatatttactttcggtaaaacccttaaacggggctaagccgccaatcttacacatttccatgcttgttttcattgtctcatacaacattaactccgctatttgtacatttaaccgtctagctggttgggaagttaaatcaaatcctaagcggagacaagttgtatgtaacccttgtatgccaatgccaagtgatcggttgttttttacacctttacatgattttttacatggaaagttcccagccgccaggaccccgtttaaaaaaataacagtcgttcttgctgtcaattgaaggtcgtttaaattaaatgacactgggcctttggataagcacgttgtaagatttatgctggcaagattacatacgccatgttgatgagcgtctgccttttgaacaatttccgtacacaaatttgaccccgtgatagcatttccttgggtattcatatgataattacgattacaggcatctttgaacattaaaaaggggcttcctgttacagcagcactgcgtatgattgtgaatgcgatatcttgaatgggaacagaagaaacgcctaatccttctctctctaaacgtaaataggttgaagtgaatgcctccccgtgtaatgttcgaaggatatcggctctgttatcaaaaagagtccactgaacattactagccccttttagatagcttaggtatctttcaaaaaataaatctggggtccataaacaacaaaatatgttatcacatcgaaatatttcatcacgaaccaacattccacgtgtggccaaaacagtttgtagatcgacgtgccatggttctatgtaaacacaaactccagttggtcgttcacaatcactgttaattgccataaccatgcaatctaaaagttttaaaactgcaagaagacctttcgtttgattttccgtaggtattaaattcagactctgtagagaaattcccactccacctcgactttgtaataccgttcccacatcgcctgtgatagctcgaacagctctcccaacagtgatggattccgggtccattaaataacaactggccgttgccccggtctctcgacctaaaaacatcataaccggtgtagccgggacaattttctgacatgccaacgctgtgaaaaatacccgacagacatcagtccatgtataaccatcatttattccgggaataagagttgcgattttaggcaggtttacgatttctgttgtcacggtggccgccagtcttaaaaagaattggcaaagcgactctaatttaccttcctctaacttagttaaataaaagtcttcgtactttaaagcagactgtagtccaagggtagctaaagcggggtattgatctttcaaaaacggttctaatatagcccgacgaatttcgtccctccgcccttcaattgcttggcggactcggggagttaaacagagaattggggaagtcaaccacgtttccatggaaacggatcgtaggttaatacggcaatggataagttctccacaacatcggtacactcgctcatcttgtcgcgtcaccgccttaagttttgagacgatagtgctaatatactccattaattccaccggtgtggttgattcgggcggaatgatgtattccttgtagccatgttgacataatcggtttataatgtcatgaaccgtattaaaaattcttttgaactccataacggataacgtatttaggctccggaataaacctttaaaccctaaactcacagctgagttagttctacaatattgtagactcccttatatatggttacgtacagcctgcccctccccagtatataatatcacgcaaaacccacgctatgttaaattcagtttattttacatacatgctttaataataacattcgttccatgtatttgtacccccccacacaaccccctctaaccaaatagttggcacgttataacctccgaaccgttccatgcgtcttgtataacgcacagactctgatggaattgttccaattaacgtatatgccgcatacatgcaggataattgtgtgggaagtccccgaaaatcgccggtccattgatacaatcgctgtctagccaagttccaatttactcctgtaatttcgccaatactacatcgagggcttgtcgggtcattggataactgcacaagcggcaacgcccttgtgttatatggctggtgggtatttgcaaccccttcagtcccccaggcggcattttcagctcgtatgcgtcctaacaggaagccaataccacgaccaaaacattgttcgtttagttggcttaatgcaagatgcagtcttacaccttctcgttggcgtcgctgtgtatatacaaaaaccaagaacacatgcttcagtccgtccgcggaaagatgtaaatctttgtcaacgtcccaaaatacgcaggccgggatgttggctgtgaccctgcgagttgaagttttgtctgtacgtgcagcttcttggggacctttggccacggcggttatattgcataaattatcctgaatggtatattccagcagggacccaaaaaaacttataaatcgatgtggaaatacatgacattgtaccatcgcacgtaaacactccgaaaaccttatgagccgcgtttccatacgactgcatccataggcagaaacaattgctgttctgttggcatccgctgcctgtttatccgtatattcttctgcccggcatgcggcgatgaaacttaatgacgttacatatgctctaagccccccaccttctccaacggtccaaggagccgtgcaggcattgaataggtttcgtaaaccctctagtagtacatcggggtcacgtccagcctgtgtaagtgtattagcttctccaatcatgtcagatggatgacgaaggattaagacgattgacccagcatgctcaatgtccggacgaaaaaaatcggttaatgacacttgttggattagctgtgtcgttgatttaaaattatttaacgggagtctaatggtaacttgcgggttaccaattgaagttggatttatttgaatgttgttcatacgattaataacaattgaacggggggttacttgaatagacgcggtttctgtacgttttggtggtacatgtatcggttgtttgttcagacctccaaagcgagggccaattgttaaatcgcgactccaatttccgaagaagcccggagcataagtcatatgaagcccgttccctatttgaataaaacggttatttcctaaaagactgatattagttccacatagcgtttgttcgtttaaagtaaaatgcgagttggttggttgactccccatagctgaggggttaaattcacacaatgcaatcgtgacgtggtactatctgaaatgttgcctggggtatgtgtacacattatacagtcgtagtaccgtttatataatgttaggtaggaggagcctataaaaatattttgattggcgttaaaaggttcttcaacttaccgtgacgtcctttttattaacatgcgtttttattgatgttacatttatgtcttttcattccggacggatgtagctttttcatatcacgttataaagttaagtcagcgtagaatataccatggaagaaccaatttgttatgatacacaaaaacttttggatgatttaagtaacttgaaagtacaagaagcggacaacgaaagaccatggtcaccagagaaaacagaaatcgccagagttaaggtagttaagtttttacgatctacccagaaaattccagctaaacattttattcagatatgggaacccctgcattctaatatctgttttgtatattccaatacatttttggcggaggctgctttcacggccgaaaatttacccggactgttgttttggagactagatctagactggacgatagaggagccaggtaatagcttaaaaattttaacccagctatcaagtgtagtacaagattccgagacgttacatcgtttatcggccaataaattacgaacctcgtctaaatttggacccgtttcgatacacttcattataacggactggataaatatgtacgaggtcgccttaaaggatgcaacaacagccattgaatcaccattcactcacgctcgtattggaatgttggaaagcgccattgcagctttaacacaacataaatttgcgatcatttacgatatgccatttgttcaagaggggattcgtgttttaacacaatatgcaggatggcttcttccgtttaatgttatgtggaatcagattcaaaatagctcactcactcctctaacacgagccctttttataatctgtatgattgatgaatatctcacggaaacgccagtacatagcatatcagaattatttgcagatactgtaaatttaattaaagatgaggcgttcgtatccatcgaagaagcggtaacgaatccacgaacggtgcacgagtcacgaatttcctcagctctggcttatcgagacccttatgtttttgagacatccccgggaatgcttgctaggagacttagattagacaatggtatatgggaaagcaacctcttatcgttgtccacccccggaattcatattgaggcgctgttacatttactaaactccgacccggaagcggaaaccacatctggaagtaatgtagcagaacacacccgtggcatttgggaaaaggttcaggctagtacatcgcctagtatgttaataagcacccttgccgaatccgggtttacaagattttcatgcaaattgctacgtcggtttattgctcaccacacactcgccggttttattcacggaagcgttgtagcagacgagcatattacagatttccaacaaacactaggatgtctcgctttagtgggtggactggcataccaattagtggaaacgtacgctcctactaccgagtatgtgttaacatatacacggacagtaaacgagaccgaaaaacggtatgaaacgctattacccgccttaggattaccaccgggaggcctgggacaaattatgcggcgctgttttgctccacgaccccttattgaaagtatacaagcgacacgcgtaatactacttaatgaaatttcacatgcagaagctagagagacaacatattttaagcaaacacataatcaatcctcaggtgcgttattaccacaagcaggacaaagtgccgtacgcgaagccgtactaacctggtttgacctacgtatggattcaagatggggtattactcccccggtggatgtgggtatgacacctcctatttgtgttgatccaccggctacagggttggaagctgtcatgataacagaagcactaaagattgcatatcctaccgaatataatcgctctagcgtgtttgtggaaccgtcgtttgtgccttatattattgcaacaagcacgcttgatgccctttcggcaacaatagctttgtcttttgatacacggggaatacagcaagccttgtctattcttcagtgggctcgcgattatggatccggaaccgtgcccaatgcagatggatatcgcacaaaactatctgctcttataacaatattagaaccttttacccgtacacaccccccagtacttttaccatctcacgtttctactatagattcccttatatgcgaacttcatcggactgttggcattgccgttgacctgcttccccagcacgtccgtcctttggttcctgaccgtccttctattacaaatagcgtttttttagcaactctctattatgatgaactttacggtcgttggacccgactggataaaacatcgcaggcgttggttgaaaattttacatccaacgcgttagtggtttctcggtacatgttaatgttacaaaaattttttgcgtgtcgtttttatccaacgccagatcttcaggctgttggtatctgtaacccaaaggttgaacgcgatgaacaatttggggtatggcgtttaaacgatcttgctgatgcggttggtcatattgttgggacaatacaaggaatccgaacgcaaatgagagtgggaatatccagcctgcgcacaattatggccgatgcttcctcagcccttagggaatgtgaaaatttaatgactaaaacctccacttctgctattgggcctcttttttcaacgatggcttcccggtatgcacggtttacacaggatcaaatggacattttaatgcgtgttgacaaactaacaacaggagaaaatatacccggtcttgcaaatgtagagatttttttaaataggtgggaacgaatagcaacagcttgtaggcatgccacggcagtcccgtcggccgaatctattgcaaccgtgtgtaatgaattgaggcgcggtttaaaaaatatacaagaggatcgtgtaaatgccccaacctcatatatgagtcacgcccgaaatctggaagatcacaaggcagcagtttcattcgttatggactccaggcaacagtttattgtggattctggacctcagatgggcgcggttttaacttcacaatgtaatataggaacatgggagaatgtaaatgcaacgtttttacatgataatgttaaaataacgacaacggtcagagacgtaatttcagaggctccgacgctgataataggacaaagatggcttcgtccagatgagattttatctaatgtagatttgcgtcttggcgtacccgggaatacaagtgggagtgacccttaatataaaacaggcgtgtttatgtacattaaagtatttgtggtttttattgactgggcgtttcgtttgtataacgctgttgttgctagtattttcataacctcctaggtttttggagctacacgtgcttattcaacgctctttgggatttgaatcatcgtaaacgtagcgtccctaccagttgagcgcgtaattttcgtaagcaataaaatggatataattccgcctatagctgtcactgttgcgggagtgggaagccgtaatcaatttgacggtgccctgggaccggcgtcaggtctgtcatgtttaagaacatctttatcgtttttgcatatgacatatgcgcatggaattaatgcaaccctgtcatcagacatgattgatggatgtttacaagagggtgcagcatggactacggatctgtctaatatggggaggggtgtcccagatatgtgtgctcttgttgatctccccaatcgaatttcatatattaaactgggggacactaccagtacgtgctgcgttttgtctagaatatacggcgatagccatttttttaccgttccagacgagggttttatgtgcacacaaattcccgctagagcgtttttcgatgatgtgtggatgggacgtgaagagtcgtatacaattataactgtagactcaacgggaatggccatctatcgtcagggaaacatatcttttatttttgatccacatggccatgggactataggacaggctgtagttgttcgggtgaataccacggatgtgtactcttatatcgcatcggagtatacccaccgccccgataacgtagaatcccaatgggccgctgcattagttttttttgtcaccgcaaacgacggtcccgtaagcgaagaagcgctatcttcggcagtaacgcttatatacggaagctgtgatacatattttacagatgaacaatattgcgaaaaactggttacagctcaacatccgttgcttctttcacctcctaattccacgacaattgtgcttaataaatcgtctatagtacctcttcaccaaaacgttggtgaaagtgtatccttggaagcaaccctacattcaacgttaaccaacacggttgcactggaccctagatgtagttacagcgaggttgatccttggcatgcggttctagaaacaacctcgactgggtctggcgttttggattgtcgtcgtagacgccgtccttcatggactcctccttcaagcgaggaaaatttagcttgtatcgacgatggcttggtaaataatacacattccacggataatttacataaacccgctaaaaaggttctcaaatttaaaccaactgtagacgtgccggataaaacacaagtggcacatgtattaccccgcctacgagaagttgctaacaccccagacgttgtgttaaatgtatccaatgtagatacgcctgaatccagtcccactttttcacggaacatgaatgtaggaagcagtttgaaagatcggaagccatttctatttgaacagagtggtgatgtcaacatggttgtcgaaaaactactacaacatgggcatgaaattagcaatggatacgtacaaaatgcggtgggtacgttggatactgttattaccggtcatacaaatgttcccatttgggtaacaaggcccttggttatgccagacgaaaaggatccattggagctttttattaacctcaccattttgcgtttaacgggatttgtggtggaaaatggaacacgtacacatcatggtgctacaagcgttgtatcagactttataggtccccttggggaaattttaacaggatttccctccgccgcggaacttatacgcgttacaagtttgatattaacaaacatgccgggggcggaatatgctattaaaactgttctccggaaaaaatgtacaattggcatgctcattatcgctaagtttggtctagttgccatgcgggttcaggatacaaccggcgctttacatgccgaactagatgtgttagaagcggatctaggaggttcgtcgcccatagacctctattctagactgtcgacaggtcttataagtatactaaattcgcctattatttctcatcccggactttttgccgagcttattccaacccgtacagggtccctgtctgaacgaatacgtcttctttgtgaattagtctcggcccgggagacacgctatatgcgtgaacacaccgcgcttgtttctagtgtaaaggctttagagaatgcattacggtctacccgcaataaaattgatgccattcaaataccagaagttccccaggaacccccggaagaaaccgacattccacccgaagagttaattcggcgtgtatatgagatacgatccgaagttacaatgctattgacctcggctgttacagaatacttcacccgcggagtgttatatagcacacgggccttgatcgctgaacaatcccctaggcgttttcgggtcgcgaccgcaagtacggcacccattcaacggcttttagattctcttccggaattcgacgctaaattaacggcaatcatatcgtccctgtctatacaccctcctcctgagactatacaaaatctccccgtcgtatctctgttaaaagagcttattaaagaaggggaagatttaaacacagacacggctctcgtatcgtggttatctgtagtcggggaagctcaaaccgcaggttacttatccagacgagagttcgatgaattatcacgtacaattaaaaccattaatacacgcgcaacgcaacgggcttccgcggaagcagagttgtcttgctttaatacgctaagcgcggccgtagaccaagccgtaaaggactatgaaacatataacaatggtgaggtcaagtatcctgaaataacacgggatgatttattagcaacaattgtacgtgctacagacgatttggtgcgacagataaaaattttaagtgatccaatgatccaatccggtttacaaccttcgattaaaagacgattggaaacaaggcttaaagaggttcagacgtatgcaaacgaggcccgaaccacacaggacacaataaagagtcgaaaacaggcggcatataataaactcggggggttacttcgcccggtaaccggttttgtgggacttagggctgcagtagatttattaccggaacttgcttctgagttagatgtccaaggagccctggtaaatctcaggaccaaagtcttagaggcgccggtagagatccgttctcaacttacgggtgatttctgggcgttatttaaccaatatcgagacattttagaacatcccggaaacgcacgcacatctgtcttaggaggactgggagcttgttttacagctattatcgaaattgtgccgatacctacggagtatagaccatcattgcttgcgttttttggtgacgtggcagatgtgcttgcatccgacatcgcgaccgtatctactaacccggaaagtgagtccgccataaacgctgttgttgcaactcttagtaaagcgacgttagtttcatctacagtgccagccttatcctttgtgttgtcgttatataaaaaatatcaggctttacaacaagaaattacgaatacccataagttgactgaattacaaaaacaacttggagatgacttctccaccctagctgtctcatctggacacttgaagtttatatcatcttcaaatgtagatgattatgaaataaacgatgcgatattatcaatacaaacaaatgtgcacgccctaatggatacggttaaacttgttgaagttgaactgcaaaagctacccccccattgtattgctgggacatctaccttatctcgagtagtaaaggatcttcataaactcgtcacaatggcacatgagaagaaggaacaggcaaaagtgttaattaccgattgtgaacgtgcacataaacaacaaacgactcgggttttgtatgagcgttggacacgtgatattatagcatgtctggaggcaatggaaacgcgccatatatttaacgggacagaactggcacggttgcgagatatggccgctgcgggagggtttgatatacacgcagtttacccacaagcacgtcaggttgtagcggcatgtgaaactacagccgttacggcattagatactgtgtttcgccacaatccatatacccccgaaaatacaaatattccaccacctttggctttgttaagagggttaacatggtttgatgatttttcgattacggctcccgtattcaccgttatgtttccaggtgttagtattgagggactccttctgcttatgcgtattcgcgcggttgtgttattatccgccgatacgtctattaatggaatacctaactaccgagatatgatattacgaacctcgggggatctattacaaatacccgcattggctgggtatgttgatttttacacacggtcttatgatcagtttataaccgaaagtgtaacgttaagtgaacttagagcagacatcagacaggctgccggggctaaacttacagaagcaaataaggctttggaggaagtaactcatgttcgggcacacgaaacggctaaacttgcacttaaagaaggtgtcttcattacattaccaagcgaaggtttattgattcgggctatagagtattttacaactttcgatcataaacgatttataggaacggcatatgaaagagttttacaaacaatggtagaccgcgatctaaaggaggccaacgcagagcttgcacagtttcgtatggtgtgtcaggcaacaaagaaccgtgcaatacaaattttacaaaacattgttgatacggccaatgccactgagcaacaagaagacgtggatttcactaacctgaagacgttattaaaactaaccccccctcccaaaacaattgcattggccattgatagatctacttccgttcaggacattgtcacgcagtttgcattgctgttagggcgtctggaagaagaaactggtacgttggacattcaggcggttgactggatgtaccaagctcgcaatattattgactcccatccactaagtgtgcgtatagacggtaccggccccctgcatacttataaagatagggtggataaactttatgcgttacgaactaaattagatctcctacgacgacgaatagaaaccggtgaggttacgtgggacgatgcatggacaacatttaaaagagaaacgggggatatgttggcatcgggggacacgtacgctacttccgtagatagtataaaggcactccaggcatcggcgtctgtggttgacatgctttgttccgaacccgaattttttttattgcctgtggaaacgaaaaaccgtctccaaaaaaagcaacaggaacgtaaaacggcgttggatgttgtgttgcaaaaacaaagacagtttgaagagaccgcgtctcgcttacgagctttaattgaacgtattccaacggagagtgaccatgacgttcttcgtatgttattacgtgatttcgatcaatttacacatttgcctatatggataaaaacacagtatatgacatttcgaaatttactcatggtacggttaggcttgtatgcaagttatgctgagatttttccacccgcgtctccaaacggagtatttgctcctattcccgccatgtcgggtgtatgtctagaagaccaatcccgatgcattcgcgcgcgggtggccgcgtttatgggggaggcgtctgtggtgcaaacgtttagggaagccagatcttctatagacgctttgtttggaaaaaatttaaccttttacttggatactgatggggttccacttcgatatagagtgtgttataaatcagttggggttaaacttggaaccatgctatgcagtcagggtggattatctttacgaccggcacttcccgatgaaggtattgtggaagaaactacactatcggcattacgcgtggccaatgaggtcaatgagctacgcattgaatacgaatccgctataaaatccgggttttctgccttttccacctttgttaggcatcgccacgccgaatggggtaaaaccaacgcacgcagagccattgcagagatatacgccggccttataacaacaacattgacacgacaatacggggttcattgggacaagcttatttattcttttgaaaaacaccacctaacttctgtaatgggcaatggactaactaaaccaatccagagaaggggtgatgtacgcgtattagagttaaccctatctgatattgtaactattttggttgccacaaccccggtacatcttctcaattttgctagattggatttaattaaacagcatgagtatatggcccgtaccctcagacccgtaatcgaggccgcatttagaggtcgtttactcgttcgctcattggatggagacccgaaaggcaatgcccgggccttttttaatgccgccccatccaaacataaactcccgttagctcttggatcaaaccaagatcctaccggcgggagaatatttgcatttcggatggcagattggaaacttgttaaaatgccacagaaaataacggatccttttgcgccatggcaactttcccccccccccggggtaaaggccaatgtcgatgcagttacccgtataatggcaacagatcgtcttgcgaccattactgtacttgggcgcatgtgtctcccgccaatttccttagtgtcaatgtggaatacgctgcaaccggaggaattcgcatacagaacacaagatgatgtggacattatagttgatgcgagactggatttgtcatccacgcttaatgcaagatttgataccgctcccagcaataccacgttagagtggaatacagaccgtaaagtaattacagatgcttatattcaaaccggggcaacgacagtttttacagtaacgggggcggcaccaactcacgtttctaatgtaacagcgtttgacatagcaactacggctattttatttggggctcctttggttattgccatggaacttacatccgttttttcacaaaattccggacttactttggggttaaaattattcgattcccggcatatggctacagattcgggtatatcctcagccgtatctcccgatattgtttcttgggggttacgtttactgcatatggatcctcacccaattgaaaatgcatgtttaattgtccaactagaaaaactgtccgcgctcattgcaaacaaacctcttacaaacaatcccccgtgtttactgctattggacgaacatatgaatccctcttatgttttatgggaacgaaaagactcgattccagctccggattatgtggtcttttgggggccagaatctcttattgatttgccgtacatcgactccgatgaggactctttcccctcgtgtcccgatgatccattttactcgcaaattattgccggttatgcgccccaaggccccccaaacctcgacacaactgatttttacccaacggagccactatttaagtctcccgttcaagttgttagaagttccaaatgtaaaaaaatgcccgtccggcccgcgcagcccgcgcagcccgcgcagcccgcgcagcccgcgcagaccgtccagcccgcgcagcccatagaaccgggcacacaaatagtggtacaaaattttaagaaaccccaaagcgtaaaaacaacccttagccaaaaagatattcccttgtatgtggaaaccgaatcagaaacggctgtgcttatacctaagcaattaaccacctccattaaaacaaccgtttgtaaaagtattaccccaccaaataaccaattgtcggattggaaaaataatccacagcaaaaccaaacgttaaaccaagcgttcagtaaaccaatacttgagattacctccattccgacagatgactcgatatcttaccggacttggattgaaaaatcaaatcaaacacaaaaacggcatcaaaatgaccctcgaatgtataactccaaaacagtattccaccctgtaaataaccaattaccttcttgggttgacacggcagccgatgccccccaaacggacctattgacaaactataaaacaagacagccgtcgccaaactttccgcgggacgtacacacatggggcgtatcttctaacccgtttaactcaccgaacagagacctatatcaaagtgattttagtgaaccttctgacggctatagcagtgagagtgaaaattctatcgtactaagtctcgacgaacatcggtcatgtcgcgttcctaggcacgtacgcgttgttaatgccgatgtagtcaccggtcgacgttatgtccgagggaccgccttgggagcactggcactgttaagccaggcatgtcggcgtatgatcgacaacgttagatatacacgtaaacttttaatggaccacacggaagatatatttcaaggcctggggtatgttaaattgttattagatggaacatatatataaagtagcgcctattaaagaaaaaaaaaaaacaacgattattttctgtgtatttttatttacaccctacgacttcttgaagcgtttccagattgtcccgtgtgtgacaaggtctgtcccttacccccctggggggtattttgggttgggggcggggtagactgtggcacgccttgggccgcgggcggtgatccggttgttggctggacagtgcttgactgtgctccctgttgcggttgttgtccagaagaccccgacaccacgtgttgctgttgtccaacggatgccgacgtcgtttgaggtggggggtgttgcggggatgatcccgaaaacgccaacgcggcgggctgttgtaaagcagactgatcggcgctctgtgttttttgcggcaatatagtaggccccgagattcccaaactcatggatggatttgggggttgtggtcgtataatacgcgggttaaacgtacgttttaagccaaccgttggtcttaaccatgtcatagggtcagtctcggcaaacatggccgttcggcgtatcgtatttgcattatggttagcgcgtgcacgcgcggcactggccgcggctcccacggtgtaaatgcttctggcatcagcgatgtccacacggtgaccaggttgcaaaggtccactggcgtttaaaagtcgtattaaagcaacgggggtgtaagccgcaattgcttccaccgaaaatgtggtggggttgctgggatcaaagactacacgagacgatgcgggttgtgtcatcgtttattagtttacgggacaatcgataacagcatacacgtacatctgcgcaggatatgtacggaaaggcaatttatttccagaaaagcaccgcccctaatacaactaccagtacaattacaatgaacagggcatatgtcacgttagctacgggtagagcaagtttccagacacgcgtagtttgggtatcgggtaacgcaggtttaatgtcactttgcatttgaacagacgtgtttggacttccgttctcgggtggggatctgaatgaaggccgccagcgtatatattcatccaaattattgccagtttccttatacatgtatgcatccgtggcgcgggccataagtttaatggtgcgagatggatcttccggtcccataaaacgaaaggataactgaacatatggcattcgcacaaagcagttcacccacattaaagcctggagaggtcggcggtcaatacccccacctcgtttaattgattccaaagcagataggttgataccggtacttaacgttgaactaagaatcacgttattactgtcaatggacacttcagccactggtgcgttagtcggacgaaaaaaaaaaccttgaaatagcacagacacccccgtattttgaatttttatgtaagggtcacaatctacttgcgcccaattcgccattaaacgcataatatactctaccggaaaggcttcggatacgttgtcttcgccgttaaactgaaaaacacaacgggcgggggggcgttgtggatcaaatattggaagatccccatcgcaacattgaagagcgcttggtaccaccaaccgaatacgttgtaaaagattatctccgcaacccctcctgcgttcactccgtacatacgttctccgtgacatattgatctaaggttgcaaaccaaggcacacgcgtgaagtatttagaccatttatcgtgggatataggaggagtttggagtgatccaccccctgacgacttattaatgcgtttattttccccatgtattaagcatccttcaatatttcatgcaaatctagaaatttggccatgactcccgcaaagcgttcacggcgacgggtcacgctggcactatgttcacatggaacaacataagcagatttttctgaatcgttactttctttatgttttaaaacggacgccaggcgactggtaaatgatatataatttaattgagcgtcagttgtaggtagaattgcttctatttccgggggaattaaattttcaaaccaaacggaaagagtaaaggtgctatcagcaggaaaatactttgactccagtgcatcgatatttaatagattaacatcggtgtctgtaattaaatcgcgggccctcatcccagagatggatcgggtagaatcagaagaacccatggatggattcgaatcgcccgtattctccgaaaatacatcttctaattccggatggtgttccgacgcattttccgattcgtacatcgcttataatccagcccttctgctaaaaaacgatttgttattttcagaattgttatttgcctcccacttaataaatgttccccgtgcaatagaaaacaacgtcacttatgaggcctcttcggcggtaggtgtggataatgaaatgacctcaagtaccactgaatttatagaagaaattggagacgttttggcgttagacagagcctgtttggtctgcagaacgcttgatttgtataaacgtaaatttggactgacaccggaatgggttgcggactacgccatgttatgtatgaaaagtctggcatccccgccctgtgcagttgtcacttttagcgctgcctttgaatttgtgtatcttatggatcgttactacctgtgccgttataacgttactttggttgggtcctttgccaggcgcacgctttccctgttagatatacaaagacatttttttttgcatgtatgttttcgtaccgatggagggttaccaggtatacgaccgccccccggtaaggaaatggccaacaaagtaagatattccaattactccttttttgtacaggcggtagttagggctgcattactatcgatcagcacgtctcgtttagacgaaaccgaaacgcgtaagtcattttactttaatcaggacggactgactggaggccctcaacctttagcggccgccttggctaattggaaagattgcgcgcggatggttgactgttcatcatcggaacatcgcacaagtgggatgattacctgcgcggaacgtgcattaaaagaggatatagagtttgaagatatattaatagacaaacttaaaaaatcgtcttacgtagaagcagcttggggttacgcagacttggctttattattactgagtggggttgctacttggaatgtagacgagcgtacaaattgtgctatagaaactcgcgttggatgtgttaaatcatactggcaggcgaaccggattgaaaactccagggacgttccaaaacaattttccaaatttacgagcgaggatgcctgtcccgaagtagcatttgggcctattttgttaactaccttaaaaaacgcaaagtgccgtggtcgcacgaataccgaatgcatgttatgttgtttattaaccatagggcactattggatcgctttgcggcagtttaaaagggatatattagcatactcagcaaataacacaagtttatttgactgtatcgaacctgtaatcaatgcatggagcctagataaccccattaaacttaaatttccatttaatgatgagggtcgattcataaccattgtaaaagcagcaggttccgaggccgtatataaacatttattttgcgatctcctatgcgctctctcggaattacagacaaaccctaaaattttatttgcccatcctacaaccgcggataaggaagtgttggagttatataaagcccaactggctgcacaaaacagatttgaaggtcgtgtatgtgctggcctgtggacattggcgtatgcatttaaagcctaccagatttttccacgcaaaccaaccgccaatgccgcattcatacgagatggaggacttatgcttcgacgacatgcaatatcgctggtctccctcgaacacaccctatcgaagtatgtctaggcgatataaatccgtatctcggagcgggccttcgatgcgtgtacgctccagaacgccatgccgccgtcaaaccattcgaggaaaacttatgtcaaaggagcggtctgtgtaccgccattattttaattacatcgcaaggtcccccccagaagaactagctaccgttagaggcttaatcgtgccaattattaagacgacccctgtcacccttccgtttaacttgggtcagacagtggcggataactgcctgtcgttatccggaatgggttatcatttaggtctcggaggttattgtccgacatgcactgcatctggagaaccgcgtctatgtcgaaccgatcgggcggctctgatactagcatatgttcagcagcttaacaacatatacgaatatcgtgtgtttcttgcatccattttggcgctatcagaccgagccaacatgcaagcagcgtccgctgaacccctattgtcgagcgtattggcacaaccggaattattttttatgtatcatattatgagggaggggggcatgcgagatatacgcgtacttttttatcgtgatggagatgccggagggtttatgatgtatgttatatttccggggaaatctgttcacctccattacagactaatcgatcatatacaggccgcgtgtcgggggtataaaatagtcgcacacgtttggcagacaacatttttactgtcggtatgtcgcaacccagaacaacaaacagagactgtggtgccatccattggaacatcggacgtttactgtaaaatgtgtgaccttaactttgatggagaattgcttttggaatacaaaagactctacgcattatttgatgactttgttcctcctcggtgatttcagcttcagtgttcattttattatcccagcacggggcgtgtatacaaacaaagcctgccgcctgcaagcggtttagcattttaacgttaacaactcgtgtctctggaataaaacgttttaaaagccgttctgtgagtttagtgtcgtttccaaataacgccttaaaagttacactcgccgtcccaatgagatgagaaaaataatagtcaatgtttaaagacagcccgtgtgatgttacgtgaatgggatcttccgctaagtcagatattattaacttacgctttgcttccccacaccgtttacctgcggtattctgtaaaggatctccacgtagcaaagctacactttttgcatcagcctccacttcgtctgtgggggccacaataacataagggatgcgttctcgaacgtttgggatttgaccctgtctcattactaatttataatatactgttaagtgagccaagcgacggtttatgtaggcggatggtggacgactaagctcggccgtcataacaaacttattaatatccaatttgggtgatgtaatctggcgatgtgcatctgcaattatgcgtccaaacccggccatcccagacggcatggcccgtctattccattcagcaatggaaacacacgacgcctccgccgcagcacgcgagacggtgtcgtcatataacaacagttctacaagtttgcgggcataatcgttaataaattgacagttgttttttctaaccaagtcgactcccttcattaaaacctttccgccgtaaattaccccaatgtactttttctttgttataagcaaaagttttataaaagttttttcacactccaactttataggaggacaaaacagagccgttgaaattatatgtgccattttctcgccgattttagctatcccctcaacactaacacccttgaatcggataaacacagaatccgtatctccatatataacctttacctcgtacgctttttgggagagaacgctactttcaatgtctggaaacgctgtaataaaacgttcaaatgcggcccagttattatgaatataatctctggtacttaataacatttgacggccaattgtagtgacagtggccgctacgtataaacatggcagaaatccctgcgcaactccagtaaaaccgtacacggaattacaaactacttttatcgcggcttgttgtttgtctaataacactgcttcatctgaagaacttccgggtatgcgcgctctaatagccttgcgcatagccaaccagtcttttaaaagaacacccagcagactttctcgaacgttagagcgcacaaaaaaaagacgttttcctccaactgtaaaggtggcataatcggatggattcaaacgtttaaccgtctcaaaatttaacgttagcgtggtaaaacataagttatgggcctgaattatacttggatataaacttgcaaaatccaatacgaccaccggatcgatataaaatcccgtatcagggtcaaaaaccctggctcctttatatcctacatttcgcccacttgacgtaccagtgggagaaacgctctcgtcttcatccatctcttcctcaacatccccgacatcgggaataacatccttatattcaaaagtagctgggtatcccccatcgggtaaaataaatcctcgagacgaagccagtcctaataaacaggtgtaaatcctaacctgctgtccgtcgtaaatagccttggttaaagtaattctagctagccttgcaaccgcggataactcaaggtgtggtaaatatttaaaaaacagtttccccacaagagccgagtcttgtatacaatattcaccaataattcctcgtgtattcggtccactagcgtaatatcccggaatgtctttgtagggcaaatctctcttggactcatttagagcttcacgtgcaaccgaatctaatttataactcgagagttttaatttttcagttgcaattgcatacatatccagagatatgagaccgttgatctttaccttgcttcgtcgctgaaatccggatttgccaacatcccatatcttaaacagacccccacggtttatactgccataaccatcaagcttgagactgtatatagaattaagtttctccataataaacgcccaatcaaaattaacaatgttataacctgtggcaaactcgggagcgtactgttttacgagggtcataaatgcaattaatagctcgaattcactatcaaactccagcacagtcggctccggtaaccccgcgtccttcatttcttgtacatacctttgtggtaagtcacaagagccaagggaaaacagtaaaatgtgttctaaagactgtcgagggattgaatataatagacaagaaatttggattacaagatcctccagatgtgttgcatcgggaaacgccagctcattagatcctcctgatttacattcaatatcgaaacataacaacttgtagtcaggccatgagtcatcgtttggtatagcctgcagattatccgacatgcagtcaatttcaacgtcgcttaacgttaattggcgacttgccggtcgaactcgaacacgttccccatcaactccaggttttagttgataccaaccaaaactaacaaagccgggattatccattagaaaacgagtggtagcgtctacccgaccttcatactttttcaactccgggtgaaagttatcacaaagataatttgtaaatttagatgagggagaatacaccctgtaaaacgcacatggctgtgtatcgtagtaataaacatctgtgcgctcaataacctcaacgcgaaagctttctggagatgcgcttttaaacgaggtaccatgaaaagcgttcttgtctccatttaacgttgcatcattttgtgttatcatagaactgcgtaaacactcggcaagtaatacagataactcgctaccggaacgtatgccacaagcggtatccacctcggctttgtttatataaaaatattgacagatgccgtatacatgaactgccaccctttttccacatcgggacatgccaagtaaagtaataacggtaccaagcggtcgtgttgcagttgcaaaccgggatacatctccattagacgcggcttctgttgtttcgacaatatcatatacatggaatgtgttaaagcgggggtcaaacttatccccacgaaagtcgatttccccccaaatattcacgcgtctaggccaggggctggaacaacgaaaatccagaatcggaacttcttttccattacagtaaactttaggcggtcgactaagtgtaccgacgtgaaccccctttcgttcttccatgggcacatcttcatctaaacatttaggggccaaaaattgaaacgatgacatggtagttttgtaactatgaagaaattctctgttactaccgcgcccggttcttgggttatatttaatccctgatgcttgggttaaaaagggattacaaaaccccgttctgatcgccattttatgttaacgattgataatcttgtaaaaagccagtgttactgagtaacacaaccccacgcccttctaatacataaagtgtaatcacgtgatttgttgtggtttccgcatatgtaatacccgtttaaaagcctctcttcttaatgtatcgacagactgggttttgggtggtcatttgaccctgccaacaaccccccattattacgagtacttcaccaaaatggaaaatactcagaagactgtgacagtgcccacggggcccctgggttacgtttatgcgtgccgggttgaagatttggatctggaggaaatttcatttttggccgctcgtagcacggactctgatttggctttattacctttgatgcgtaatttgaccgtggaaaaaacttttacatccagcctggcggtggtttctggagcacgcactacgggtcttgccggagctggtattaccttaaaactcactaccagtcatttctatccatctgtctttgtctttcacggaggcaaacacgttttacccagctccgcggccccaaatctcacacgcgcgtgtaacgcggctcgagaacggtttgggttttcacgctgccaagggcctcctgttgacggtgctgttgagacgaccggcgctgagatatgcacccgccttggattagagccagaaaatacaatattatacttggtggtcacggcattgtttaaggaagccgtatttatgtgcaacgtgtttctgcattatggaggactcgatattgttcatattaaccatggggatgttatacgtataccgttatttccggtacaacttttcatgcccgatgttaaccgtctggtacccgacccattcaacactcatcacaggtctatcggagagggttttgtatacccaacacccttttataacaccgggttgtgccatttaatacatgactgtgttattgctcccatggccgttgccttgcgcgtcagaaatgtaactgccgtcgcccgaggagcggcccaccttgcttttgatgaaaatcacgagggggcagtactcccccctgacattacgtacacgtattttcagtcctcttcaagtggaaccactaccgcccgtggagcgcgtcgaaacgatgtcaactccacgtctaagcctagcccatcgggggggtttgaaagacggttggcgtctattatggccgctgacacagccttgcacgcagaagttatattcaacactggaatttacgaagaaactccaacagatatcaaagaatggccaatgtttataggcatggagggcactttgccaaggctaaacgctctggggtcatataccgctcgtgtggccggggtcattggtgcgatggttttcagcccaaattctgcgttgtatctaactgaggtggaggatagcgggatgaccgaagccaaggatgggggaccgggtccatcatttaatcgattttaccagtttgccggacctcatttagctgcgaatccccaaacagatcgagatggccacgttctatccagtcagtctacgggttcatcaaacacagagtttagcgtggattatttggcactcatttgtggatttggagcacccctgttggcgcgactgcttttttatctagaacgctgtgacgctggtgcgtttacagggggtcacggggatgcgttaaaatatgttacggggacctttgactctgaaattccatgtagtttatgtgaaaaacacacgcggccggtatgcgctcacacaacagtacaccgacttagacaacgcatgccgcgatttggacaagccacccgtcaacctattggggtgtttggaacaatgaacagccaatatagcgactgcgatcctctaggaaactatgctccatatttaatccttcgaaaacccggggatcaaacggaagcagcaaaggcaaccatgcaggacacttatagggctacactagaacgcttgtttatcgatctagaacaagagcgactactggatcgcggtgccccatgttcttccgagggactatcgtctgtcattgtggatcatccaacgtttcgtcgcatattagacacactgcgtgcgcgtatagaacagacaacaacacaatttatgaaagtgttggttgagacccgcgattataagatccgtgaaggattatccgaagccacccattcaatggcgttaacgtttgatccatactcaggagcattttgtcccattaccaattttttagttaaacgaacacacctagccgtggtacaagacttagcattaagccaatgtcattgtgtattttacggacagcaagttgaggggcggaactttcgtaaccaattccaacctgttttgcggcggcgttttgttgacctgtttaatggggggtttatatcaacacgctctataaccgtaacattatctgaaggtcctgtatccgccccaaatccgacattgggacaagacgcgcccgcggggcgtacctttgatggggatttagcgcgcgtaagcgtggaagttattcgggatatacgagttaaaaatagggtcgttttttcaggtaactgtacaaatctctctgaggcagcccgggcaaggcttgtaggccttgcaagtgcgtaccaacgccaagaaaaaagagtggatatgttacacggggccctagggtttttgcttaaacagtttcacggcctgttatttcctcggggtatgccaccaaacagtaaatcccccaacccgcagtggttttggaccctgttacaacgcaaccagatgccggcagataaacttacacacgaagagattaccactattgcagctgttaaacggtttaccgaggaatatgcagcaataaactttattaatctacccccaacctgcataggagaattagcccagttttatatggcaaatcttattcttaaatactgcgatcattcacagtaccttataaataccttaacttctataattacgggtgccaggcgcccgcgtgacccatcatccgttttgcattggattcgtaaagatgtcacgtccgccgcggacatagaaacccaagcaaaggcgcttcttgaaaaaacggaaaacttaccggaattatggactacggcttttacttcaactcatttagtccgcgcggccatgaatcaacgtcccatggtcgttttaggaataagcattagtaaatatcacggagcggcaggaaacaaccgcgtctttcaggcagggaattggagcggtttaaacgggggtaaaaatgtatgcccgctatttacatttgatcgcactcgccgttttataatagcatgtcctagaggaggttttatctgccccgtaacaggtccctcgtcgggaaatcgagaaaccaccctatccgaccaagttcgcggtataattgtcagtggcggggccatggttcaattagccatatacgccacggttgtgcgtgcagtgggcgctcgagcacaacatatggcatttgacgactggttaagtcttacagacgatgagtttttagccagagacttggaggagttacacgaccagattatccaaaccctggaaacgccctggaccgtagaaggcgctctagaagcagtaaagattctagatgaaaaaacgacagcgggagatggggaaacccccacaaacctagcatttaattttgattcttgtgaaccaagccatgacaccacatctaacgtattaaacatttcagggtcaaacatttcagggtcaactgtccctggtcttaaacgaccccccgaagatgacgaactctttgatcttagtggtattcccataaaacatgggaacattacaatggaaatgatttaacctccctctttatccaattaaagcccacacgcgggtgagtgtacgtaataaacaagtcaatattacatattctgttgtgttttctttttttgtgtgtagtccttacccatatgacctgtaatatagtgtgtctccaaccattcagcttacagtccagtggacagtaacagcccgataacatggaattggatattaatcgaacattgttggttctactgggtcaagtttatacgtacatctttcaggttgaactgctacgtcgatgtgatccaagggtggcgtgtcgctttttatatcggttagcggctaactgtttgacagttcgttatttattaaagctgtttctccggggatttaatacccagctaaaatttggaaacactcccacggtttgtgcactgcattgggcattatgttatgtaaagggagaaggtgagcgtttgtttgagttgctacaacattttaaaacgcgttttgtttatggtgagactaaagactcaaactgtatcaaagattactttgtctcagcgtttaacttaaaaacctgccaatatcaccatgagctgtcgttaacaacatacggaggttacgtatcgagtgaaattcagtttttacacgacattgagaattttttaaaacagcttaattactgctatattatcacgtcttctcgtgaggcgctaaacacattggaaaccgtgacgcggtttatgacagatactataggaagcggtctaataccacccgtggagttgtttgatccggcgcatccatgtgctatatgttttgaagaattatgtataacagctaaccaaggtgagaccttacatcgtagattattaggatgtatctgcgatcacgttactaagcaagttcgggttaacgtggatgttgacgatattattcggtgtttaccatatatccctgatgtaccggatatcaaacgtcaatccgccgttgaagcgttacgaacacttcaaaccaagacggtagtcaatcccatgggagcaaagaacgatacgtttgaccaaacatacgaaattgcgagcaccatgcttgattcttataatgtttttaaacctgcccctcggtgtatgtacgccatcagcgagcttaaattctggttaacgtctaattccactgaaggaccccaacgtactttagacgtgtttgttgataatttggatgtattaaacgaacatgaaaaacacgcagaacttacagccgtaacggttgagttggcgttatttggaaaaactcccatacactttgatagggcgttttctgaagaactcggatctctggatgcaattgatagtattttggttggcaatcgctcatcctcaccagacagtcagatagaagcattaattaaagcctgttatgcccatcatctatcgtcgcctctcatgcgtcacatttctaacccgagtcatgataacgaagccgccttacgccaacttttagaaagagttgggtgtgaggatgatttaaccaaagaggcgagtgacagcgctacagcatccgaatgtgatctgaacgatgatagtagcataacttttgctgttcatggatgggaaaacctgttatccaaagcaaaaattgacgctgcggaaagaaaacgagtatatcttgaacatctgtctaagcgctctctaaccagcctcggtagatgtatccgcgaacagcgccaagagctagaaaaaacactcagggtaaacgtttatggagaggccttattgcagacatttgtttcgatgcaaaatgggtttggggcacgaaacgtgtttttagctaaggtttcccaggcagggtgtattatcgacaatcgcattcaggaagcggcctttgatgcacatagatttataaggaataccttagttcgacatacagtagatgcggctatgttacctgcacttacacataaattttttgagttggtcaacggcccattgtttaatcacgatgaacaccgttttgcacaaccccctaacaccgccttattttttaccgtggaaaacgttggcctatttccgcacttaaaagaggaattggcaaagtttatgggcggtgtcgttggttccaactggcttctcagtccatttaggggcttttattgcttttctggggtagaaggcgttacttttgcacagagacttgcctggaaatatattagggagcttgtgtttgcaaccacactattcacctctgttttccattgtggggaggtgcggttatgtcgcgttgaccgtctaggtaaggatccacgcgggtgcacgtctcaacctaaaggtataggcagttcccacggacccttagacggcatttatttaacgtacgaagaaacatgtccccttgtggctattattcaaagtggagaaacagggatcgaccagaataccgtcgtaatctacgattcagacgttttttctcttctatacaccctaatgcagcggctggctccggattcaacggacccggcgttttcataacctccgttacgggggtgtggttatgctttttatgcatattttctatgtttgttacggcggttgtgtcggtctctccaagctcgttttatgagagtttacaagtagagcccacacaatcagaagatataacccggtctgctcatctgggcgatggtgatgaaatcagagaagctatacacaagtcccaggacgccgaaacaaaacccacgttttacgtctgcccaccgccaacaggctccacaatcgtacgattagaaccaactcggacatgtccggattatcaccttggtaaaaactttacagagggtattgctgttgtttataaagaaaacattgcagcgtacaagtttaaggcgacggtatattacaaagatgttatcgttagcacggcgtgggccggaagttcttatacgcaaattactaatagatatgcggatagggtaccaattcccgtttcagagatcacggacaccattgataagtttggcaagtgttcttctaaagcaacgtacgtacgaaataaccacaaagttgaagcctttaatgaggataaaaatccacaggatatgcctctaatcgcatcaaaatataattctgtgggatccaaagcatggcatactaccaatgacacgtacatggttgccggaacccccggaacatataggacgggcacgtcggtgaattgcatcattgaggaagttgaagccagatcaatattcccttatgatagttttggactttccacgggagatataatatacatgtccccgttttttggcctacgggatggtgcatacagagaacattccaattatgcaatggatcgttttcaccagtttgagggttatagacaaagggatcttgacactagagcattactggaacctgcagcgcggaactttttagtcacgcctcatttaacggttggttggaactggaagccaaaacgaacggaagtttgttcgcttgtcaagtggcgtgaggttgaagacgtagttcgcgatgagtatgcacacaattttcgctttacaatgaaaacactttctaccacgtttataagtgaaacaaacgagtttaatcttaaccaaatccatctcagtcaatgtgtaaaggaggaagcccgggctattattaaccggatctatacaaccagatacaactcatctcatgttagaaccggggatatccagacctaccttgccagaggggggtttgttgtggtgtttcaacccctgctgagcaattccctcgcccgtctctatctccaagaattggtccgtgaaaacactaatcattcaccacaaaaacacccgactcgaaataccagatcccgacgaagcgtgccagttgagttgcgtgccaatagaacaataacaaccacctcatcggtggaatttgctatgctccagtttacatatgaccacattcaagagcatgttaatgaaatgttggcacgtatctcctcgtcgtggtgccagctacaaaatcgcgaacgcgccctttggagcggactatttccaattaacccaagtgctttagcgagcaccattttggatcaacgtgttaaagctcgtattctcggcgacgttatctccgtttctaattgtccagaactgggatcagatacacgcattatacttcaaaactctatgagggtatctggtagtactacgcgttgttatagccgtcctttaatttcaatagttagtttaaatgggtccgggacggtggagggccagcttggaacagataacgagttaattatgtccagagatctgttagaaccatgcgtggctaatcacaagcgatattttctatttgggcatcactacgtatattatgaggattatcgttacgtccgtgaaatcgcagtccatgatgtgggaatgattagcacttacgtagatttaaacttaacacttcttaaagatagagagtttatgccgctgcaagtatatacaagagacgagctgcgggatacaggattactagactacagtgaaattcaacgccgaaatcaaatgcattcgctgcgtttttatgacatagacaaggttgtgcaatatgatagcggaacggccattatgcagggcatggctcagtttttccagggacttgggaccgcgggccaggccgttggacatgtggttcttggggccacgggagcgctgctttccaccgtacacggatttaccacgtttttatctaacccatttggggcattggccgtgggattattggttttggcgggactggtagcggccttttttgcgtaccggtacgtgcttaaacttaaaacaagcccgatgaaggcattatatccactcacaaccaaggggttaaaacagttaccggaaggaatggatccctttgccgagaaacccaacgctactgataccccaatagaagaaattggcgactcacaaaacactgaaccgtcggtaaatagcgggtttgatcccgataaatttcgagaagcccaggaaatgattaaatatatgacgttagtatctgcggctgagcgccaagaatctaaagcccgcaaaaaaaataagactagcgcccttttaacttcacgtcttaccggccttgctttacgaaatcgccgaggatactcccgtgttcgcaccgagaatgtaacgggggtgtaaatagccagggggtttgttttaatttattaataaaaatgtgtattacgttactcatgtgtctccattacgcatcacagggggtatttatacccgataatatacaaaacgcgttttgtacctctaccgcacccgatatcttaacggggttattatggaatcgtctaacattaacgcgctacaacaaccgtcgtctatcgcacatcatccgtccaaacagtgcgcttcaagtctcaatgaaacagtaaaagattctccccccgcgatttatgaagataggttagaacacacgccggtacaattaccccgcgacggtacaccccgagacgtatgttctgtgggacagctaacctgtcgagcatgtgcaacgaaaccttttcgccttaaccgcgacagccaatacgactacttaaacacatgtccagggggccgtcatatttcactggcactggagattataacgggtcgatgggtttgcatcccgcgtgtgtttccggataccccagaggaaaaatggatggcgccatatattattccagaccgagaacaaccatcatcaggggatgaagattctgacaccgattaaatttaacttaaataaaaccttaccacccataaaaacgccttctgtttgtttaacacgacaccgcttaacaaaaaaaaaaaaaccaaacacgccttttatgaatgtaatacttttatttgttggttaacaccgccccaccatcatctgatttgcaaacatatcggcgtcgtctgccgtggacccctgtattaaaggggccttggaactcgcctccactgcatttacatcttgtccaactgtatctgtatgtggggtgcttgttgtattttgggatgagcatagacccgaaacgctttgaagctgttttaataaaatcgatattcgaggatcccgtgtcccctctggtatatttgtatggtgcgacaaaggcatttgtgtcccattttgtgattttagctctgtaacctcctgttgcagttttgccacaaccccagcaagctcttcgtgctgaccattagaaactctgtgtctcctctgccaatatgatggagaaactcgacgtctccgatgcgttatatacgttggttcaccgggaaaatatatatttgagggaaactctccgtccatttgagactccccactataaaaagaatccaattccctttgatccatgctcttgaaatcccgttttcctggacgacggacatcggttttgtctggaaaatttacacacggggtctgcaagtcaataccccgttcggcggccaatgcgttcataaatgcggacatttgcatttccaaacgattgggtggtggatatcccggaaacccgtacggtcccccgaagtgtcccggagggcaaccataaccccctgtattaggtgggaaggcaggcgggtgtggagatccatatggcccgacgatatactgtccgttatttggagctccaattgatacctgcggatttttagtctgcccggttaacagctgtgaataatacgcggtaggtatcagtacaaattcccctccggttggaacgcccgacgggggctgtggtgagatattactagcgttacctgctacagaagccatatcgctgtcgttcctacacaactgcgtaacctttaaatgcggaacagtcttttcacaatcttcatttgattccccaacacccaacgcgagatcgtatatgggcccgccggggtggaatgtggcgtttataacacccgcgttgggtaatttagactccaccccattaacgttggttatccgagcaagtccatatccggtgctagcctgaagataaacgtgacccataattccggcttcgcgtctacgttttgcaaccacgtcccatctatctcttaaaagcatattgttcacggctgtggataataacaccttggcgagtttatcttcgctaaccttccatactttatttaaacccgcgtagtctttaaccagcgacaataaccgcgctttactttccatcgataaaacccggaatggttcaattgaagattccggggtacagtcataattgaccactgttccaacgcgtcttccaacaacacataacgcaacatgggtaaaaaaattaccgtctggtatctcattcggggacaatcgttttgaagacagggatacggagggtaagtaatttgtgaccaagtataacgcacgttctagcggagataatacagaatctctatttccaaaaaaattcgaatgggccgcttcaaacagcaccgcatgtagttgagggcatctaacgatacccaaaaaaaaaggtccgcgtatgtcctcaatgattgcgattacttcacccacgacacagtcttttcgatgatcgatgtttattggtattttactagtaggcggcaaagcggaccgcacaatctctggggtaatatttaattccccttcgtcctttgaatataaggctaaatacccagccacgtataacgcttcacagttctcttcgtcagcttcagcagccattataaacaccccacggaccggatagtgaatactcacggtgtggaggcaaactgaggaatgacacccaaacagacaaaatatagaagatcatagtcactgttaacgttgaactgcgcaaggcggcgactttcttccaatgccgcccttacacgcggttggtgcattaacattccaagtccccgttcatattgcaacataacactgtcatgtattgataccacggcggctatgggtagggatgtaacattttgtcggcggtgttctaattccaatgcaattaagcttatgagccgatcttggtactgtccagaagaaatatctattacggttcttcctaaacttccacgactaagctgggtatgcgcgtctaaacaaagagcaactaatccaggaaacatttcagtcagctctgtggtccgatttaacgtatacagtggtgctatatatcgttcacataaaaattgaaagttattattaccgcttttaaacttcccatcaaaccccgtcgctccgcgcaagattacattgttggtaggggttcctgttgcttctgacacaatcaaacccagttgaaaattattttttagtttatctccgtatacgttcccgttccataataagcgccttaataataataacgccgtaatcgtgtcaattgttaaccttaatagagtttggtcttccataagaaacacgttttgggcccgttctaaatacgccgcggccgcctgttgaatcttgtccacatatgcggtatgattgcgatcaataatgtcattaaccccaggattaaactgtccaggtgcaggcggtaggacctgcaaccgtataagcgcatccataacagaatgtgacgttaaggcgccttgatcataccgccccccacgagcatgaaactggtcgcgtggtagacgatcatagcaaaattgataactgtttttattttcgtgtgttgtcatataattcacaaatgtctcagtatattccggtaggtgctctataaggttcccgaaggacgaaacttgaggttcgtggacactattagatgtcctatacattaaatataaacataataccgcacactcgaacgcggagtacgctctatctccaacatacattctcccggcggactgtagacatgttaccgttgtgttcataaacgtacgggaaatgcgcccgtctttacaatcaactccgcgtgcagctacgggcctatctaacacaagccgttcctgcagagtacgataccatggcccgaaaacaatccctggagagttattgccccttgcccttcccaagtacaccagggtgataaaatccacttgaaagtttgtatcgtactgcaacggtgcatcatttttggcaatctgtacctcggggtgtatagactcattgcgtattatttctgtacgtgtacattcctcagattgtgcatctgcttcttccgcctcggcagcagccgtctccagggaatccaaaaccttggccatgcgcgttagttgttcttcgaggggctttaaacgacgatctatttccgttggtaacgtaatcgtttccccgcgaaggttgtctaatgcggcaacggccgccgcattttttaacgttaacgtatttttttccaaatcgggattcatacgccctcttaactcaaacgcgggagccgtccagtagtgtatggggaagttgggggctataaagttcttagtggtagacaaaaatatcccacatttattcggaaacgagatagatccgaacccatatctcgccgtcatggtgtctgcagcaaacaaagtcaactggcgtgaatataaaccggtactgctttaaaagctgttttcttacccatgggaaaacatcccggttatactttgtaaaattccaccacaagcacctaaagaaggccttctaaggggtaaatccaccccacaagctgcattttcttcaaactttgttaaagcggaacgatggcatgatttcgcacgctttttcgcaagagaacatacgtgaattttctttttgcatagacgtcttcgctctctaacggaccttatcgggggggtatattccgctacattctccaaatgcgacgctagcataacaaggtttccatgaatcacctttgggggtaaccgagttacctgtaacaggttcagaccccgttgagatacaaacacaaggaggggggtcaccattatttcatcagatcccgtgggtgtggtttcctttattaaagccatggtatccctcagctggcgcataccctcgcaaaactggtgatacttagtaggggtatgtatattagcgctaaaacggcaagattttaattccactataaaacaaacggtctttccggcaccactggattccgtttgtataatacaaacacaatcggggcgtcggcgtcccaaatttacttcaaacgacattgatatgcgtacagccctttgaacatccacgtgggataacggcgacaggagttttgccagcctcgggttgaacgcgtccgcgaaacctcgacgtacgttatcaatatcctttttgagtacatcgtaaaaacgagtgtggcaacgttgtcccaaacgaaaacacttggcccgaattcgactagcggacatatttgaagttccgtcccagaagataacctaagacgcgtttgtctacaataaacatgtcaacggataaaaccgatgtaaaaatgggcgttttgcgtatttatttggacggggcgtatggaattggaaaaacaaccgccgccgaagaatttttacaccactttgcaataacaccaaaccggatcttactcattggggagcccctgtcgtattggcgtaaccttgcaggggaggacgccatttgcggaatttacggaacacaaactcgccgtcttaatggagacgtttcgcctgaagacgcacaacgcctcacggctcattttcagagcctgttctgttctccgcatgcaattatgcatgcgaaaatctcggcattgatggacacaagtacatcggatctcgtacaagtaaataaggagccgtataaaattatgttatccgaccgacacccaatcgcctcaactatatgttttcccttgtccagatacttagtgggagatatgtccccagcggcgcttcctgggttattgtttacgcttcccgctgaaccccccgggaccaacttggtagtttgtaccgtttcactccccagtcatttatccagagtaagcaaacgggccagaccgggagaaacggttaatctgccgtttgttatggttctgagaaatgtatatataatgcttattaatacaattatatttcttaaaactaacaactggcacgcgggctggaacacactgtcattttgtaatgatgtatttaaacagaaattacaaaaatccgagtgtataaaactacgcgaagtacctgggattgaagacacgttattcgccgtgcttaaacttccggagctttgcggagagtttggaaatattctgccgttatgggcatggggaatggagaccctttcaaactgctcacgaagcatgtctccgttcgtattatcgttagaacagacaccccagcatgcggcacaagaactaaaaactctgctaccccagatgaccccggcaaacatgtcctccggtgcatggaatatattgaaagagcttgttaatgccgttcaggacaacacttcctaaatatacctagtatttacgtatgtaccagtaaaaagatgatacacattgtcatactcgcgtgtacgtgtttttcttttttatatatgcgtcatttattaccacatcctttaatcccgcctttatctccctaaaacggagtggtaatattaaaagccgccaagcctgttggtgggtgaggaggggtaaaggcacgctgtgtgcataacgttgcggtgatattgtagcgcaagtaacagcgactatgtttgcgctagttttagcggtggtaattcttcctctttggaccacggctaataaatcttacgtaacaccaacccctgcgactcgctctatcggacatatgtctgctcttctacgagaatattccgaccgtaatatgtctctgaaattagaagccttttatcctactggtttcgatgaagaactcattaaatcacttcactggggaaatgatagaaaacacgttttcttggttattgttaaggttaaccctacaacacacgaaggagacgtcgggctggttatatttccaaaatacttgttatcgccataccatttcaaagcagaacatcgagcaccgtttcctgctggacgttttggatttcttagtcaccctgtgacacccgacgtgagcttctttgacagttcgtttgcgccgtatttaactacgcaacatcttgttgcgtttactacgttcccaccaaacccccttgtatggcatttggaaagagctgagaccgcagcaactgcagaaaggccgtttggggtaagtcttttacccgctcgcccaacagtccccaagaatactattctggaacataaagcgcattttgctacatgggatgcccttgcccgacatacttttttttctgccgaagcaattatcaccaactcaacgttgagaatacacgttcccctttttgggtcggtatggccaattcgatactgggccaccggttcggtgcttctcacaagcgactcgggtcgtgtggaagtaaatattggtgtaggatttatgagctcgctcatttctttatcctctggaccaccgatagaattaattgttgtaccacatacagtaaaactgaacgcggttacaagcgacaccacatggttccagctaaatccaccgggtccggatccggggccatcttatcgagtttatttacttggacgtgggttggatatgaatttttcaaagcatgctacggtcgatatatgcgcatatcccgaagagagtttggattaccgctatcatttatccatggcccacacggaggctctgcggatgacaacgaaggcggatcaacatgacataaacgaggaaagctattaccatatcgccgcaagaatagccacatcaatttttgcgttgtcggaaatgggccgtaccacagaatattttctgttagatgagatcgtagatgttcagtatcaattaaaattccttaattacattttaatgcggataggagcaggagctcatcccaacactatatccggaacctcggatctgatctttgccgatccatcgcagcttcatgacgaactttcacttctttttggtcaggtaaaacccgcaaatgtcgattattttatttcatatgatgaagcccgtgatcaactaaagaccgcatacgcgctttcccgtggtcaagaccatgtgaatgcactttctctcgccaggcgtgttataatgagcatatacaaggggctgcttgtgaagcaaaatttaaatgctacagagaggcaggctttattttttgcctcaatgattttattaaatttccgcgaaggactagaaaattcatctcgggtattagacggtcgcacaactttgcttttaatgacatccatgtgtacggcagctcacgccacgcaagcagcacttaacatacaagaaggcctggcatacttaaatccttcaaaacacatgtttacaataccaaacgtatacagtccttgtatgggttcccttcgtacagacctcacggaagagattcatgttatgaatctcctgtcggcaataccaacacgcccaggacttaacgaggtattgcatacccaactagacgaatctgaaatattcgacgcggcatttaaaaccatgatgatttttaccacatggactgccaaagatttgcatatactccacacccatgtaccagaagtatttacgtgtcaagatgcagccgcgcgtaacggagaatatgtgctcattcttccagctgtccagggacacagttatgtgattacacgaaacaaacctcaaaggggtttggtatattccctggcagatgtggatgtatataaccccatatccgttgtttatttaagcagggatacttgcgtgtctgaacatggtgtcatagagacggtcgcactgccccatccggacaatttaaaagaatgtttgtattgcggaagtgtttttcttaggtatctaaccacgggggcgattatggatataattattattgacagcaaagatacagaacgacaactagccgctatgggaaactccacaattccacccttcaatccagacatgcacggggatgactctaaggctgtgttgttgtttccaaacggaactgtggtaacgcttctaggattcgaacgacgacaagccatacgaatgtcgggacaataccttggggcctctttaggaggggcgtttctggcggtagtggggtttggtattatcggatggatgttatgtggaaattcccgccttcgagaatataataaaatacctctgacataaaaaacatgtataataaaaagtcactataaacgtattctctacaatactttattcgcgaataatacacactacctttgggtttttttcccgtccccaaatggtgtttggtgcactctaccaaaaaatagagcgcctaaatatgctatataacgcctcccagcaaaatacggttcaaaggcattacccgatattgtattgtagtacagggcaatgggaattgatgatcccaataaacggcatagacgcacagcgccgttatagcaggggtctccagagtacagggtatctaagtaccgggatatctcatactcatgcctttccgtgacagaaacatcaaccggaacagtatccgataaaccaactcctgtttttgcaaggcgtaaaattcgcacaccttccttttttgcaagatgtgacgtttccttgtaacagggaagctgggggagtggtaagaacaacaaagtttcagccaacgtgccaataaagcccacttccctcaagaggctgtttgctgtatccacaatggtccgtattaaatcttgagcaacttgatccgtgtcatcatcactgggtaacgcgttaacataactacgcgttaaatcttcaataacggcataacaattaaacgcttcccaccgagacagtatatattgaacaatcacgaaccgttgacaggacgtcagatcacgtccgtaagcatgcccgaaaaatggaagttccccccgttcgccatataccgcaacaactgcagtatatatcgtctcacgggcttcattaagttcatcttcaagtccaggccattttctggctttaaatataacctcgtccgcaaaaaaaaccgcacatgataacgcgcggatacaatgagtagtggctttatggcgaggatcccaaatgtccattacccgggggatggtcctaatctgtacaaagttacttagtgtaatatgatcggacttcttacgccgtctaggctgtttctcagaatacggttcacccgaaatcggcacatcatctgcttttacgtcttccgtaaccacatcagcagcgcgccgactaacaattatacttgttttttcatcgtcgttacttccgttaagcgcgtctcgtatctcgggcgtcccgtcgaataatccactcactagctcctgcaaactttctggtaactccaacatacgcatatacaccaatgaaaaactggcttcgtttggtacgtacataaagccatttgtggtattaatggcggtgggtgttggaaacaattttagcttattctcgcgcgtaacatctacccccgccaccaatgttaaatgcgtcacggggagggacacgagataatctgcgagcgtagggtcctccacttcaacatcaaatgttccgcaaaggtcgcgatccaccgcccccgatcccgctgcaagtaaggccactcgatccaaaaacacgcagttattattggatgataccgcccatgtcttcccggtgcgattgagctcacttcgaacgtaactggcaacagatctgtcaccgggtccgaccccgcgaacaacatgtccaaattttgcgatctcgcctccatgtttgcggggtatggaaattaagcatcccccgcatataaaatacgccctggtagcacgctcgttaaaataaaacgttacgccgttataagatacggttgaatgatatggaaattccatattaaagcgtttatcggaacattaacctcgaacttgccgtcccgtgatcgtgtgatcgccaaccttaggtccacaccgaatatgagaaatatataactacacgcaaacattcaaaacaccgtggtatcattaacgtcatatgaaaagatccaatcaatccaatcaaccacacctcctaccgtttagcacgtcagctatgtgacatgctccaaacatacgtaaacatttagagagggtgttataacagtctgtcaggcggggtatattctacataatacaaggatcggctttaactttgtcaacatttttactttggactataaactgcgactgaacgttatgaacccaccccaagcccgcgtctcggaacagacaaaggacttgcttagcgttatggttaaccagcaccccgaagaggacgcaaaagtgtgtaaatccagtgataattcaccgctttataacaccatggttatgttatcgtatgggggtgatacggacttactattaagctctgcatgtacccgcacatctaccgtaaacaggtcggcgtttacgcaacactccgtgttttatattatatccacggtgttgattcaaccaatatgttgtatcttcttttttttttactataaagcgacacgctgtatgctcttattcacagccgggttacttctgacgattctacatcactttcgacttattattatgttattgtgtgtctacagaaatatacgatcagacctgctacccttatctacatcccagcaactgctgcttggaattattgttgtgactcgaacaatgctattttgtattacggcgtattatactctttttatagacacccgggtgttctttttgattaccggacacttgcaaagtgaggttatttttccagatagcgtttcaaaaatacttcctgtgtcgtggggtccaagtccagccgtgttactggtaatggcggcagttatttacgctatggactgtttggtggacacggtatcctttattgggccaagggtgtgggtccgtgttatgttaaaaacatctatttcgttttagtccatttcaataaatgtactataattgttcagtctaaaaataatgttgggtatttataattaccgcccccgtgttacttggaaacacccatacatatgttccactctacatcaaacttctcgcagttttcttgttcccgcacacgtttacacgtccggattcaagtcgcaacgctgctgacaaaatgacaacggtttcatgtcccgctaacgtgattactacaacggaatctgatcgtattgctgggttatttaacatcccagcggggatcattccaactggaaatgtgctgtcaaccatagaggtgtgtgcacaccgttgcatttttgatttttttaaacaaatacgatcagatgataacagcctttactcggctcaattcgatattcttttggggacatactgcaatacattaaactttgtgcgttttctagaacttggactgtctgtcgcttgcatctgtactaaatttccggagctggcttacgtgcgagatggcgttattcaatttgaggtacaacaacccatgatagcacgtgatggcccacatcccgtcgatcagcctgttcataattatatggttaagcggatacacaagcgttcgttaagcgctgcgtttgcaattgcatcggaagcgttgagtttgttaagtaacacatatgtcgatgggacagagattgactcatcgttacgtataagagctatccaacagatggctcgtaatttacgcaccgttttggactcatttgaacgaggcactgccgatcaacttcttggtgttctattggagaaagccccaccgctatcgctgctttcaccaattaataaattccaacccgagggacatctaaatcgtgttgcacgcgcggccctactttcggacctcaaacgtagagtctgtgcggatatgttttttatgacccgacacgccagggaacctaggctgatctctgcgtatctgtcggatatggtttcgtgcacccaaccatcggtgatggtatcacgaataactcatacaaacactcgcggacggcaggttgacggtgtgttggtaacaacagcaaccttaaaacggcaactattacagggaattttacaaattgacgacaccgccgctgacgtaccagtaacatatggcgaaatggttctacaggggacaaacttggtaaccgcccttgtgatgggaaaggccgtccgcggaatggatgatgtagcccgccatctccttgatataaccgaccctaacacgttaaacataccgtctatacccccacaatccaactccgattcaacgacagctgggcttccggttaacgcccgtgttcctgcggatttagtgattgttggggataaacttgtattcttagaagcattagaacggcgggtctaccaagctacgcgcgttgcctaccctcttattggaaatatagatattacgtttatcatgccaatgggagtgtttcaggcaaactccatggacagatatacacgacacgccggcgatttttcaactgtatccgaacaggatccacgtcaatttccaccccaagggatttttttttataataaagatgggatattaacacagttgactcttcgtgatgcaatgggtaccatctgccacagttcattgcttgatgtcgaggccacacttgttgccctccgccaacaacatttagatcgtcagtgttattttggtgtatacgtggccgagggtacagaggacacattggatgttcaaatggggaggtttatggaaacgtgggcagatatgatgcctcatcaccctcattgggtaaacgaacatttaacaattctacagtttatagctccgagcaacccgcgtctaaggtttgaattaaaccccgcctttgatttttttgttgcaccgggggacgtagaccttcccggaccgcagcgtcccccggaagccatgccaaccgttaacgcaacattacggattatcaacggaaacattcccgtgcctctatgtcccatttcatttcgagactgtcgcggaacccaactcggtttgggaagacatacaatgaccccggcaaccattaaagccgtaaaggatacatttgaagaccgcgcatacccaactattttctacatgctagaggctgttattcatggaaacgaaagaaacttctgtgcgttactgcgactgttaacacagtgtattcgcgggtattgggagcaatcccacagggtggcatttgtaaataactttcacatgttaatgtacataactacatatctcggaaacggtgagcttcccgaagtctgtattaatatatatcgggatttactgcagcatgtaagagcattacgccaaactataaccgattttacaatacaaggagagggccataacggcgagacctcggaagcgctaaataacatccttacggatgacacgtttattgcacctattctatgggattgtgatgcgttaatataccgtgatgaagccgcccgagaccgactccccgcaattcgtgtaagcgggcgaaacggataccaagcccttcactttgtggatatggccgggcataacttccaacgacgcgataatgtgttaatccacgggagacccgttcggggagacacgggtcagggtattcccattactccacaccatgaccgtgaatggggtattctctccaagatttactactatattgtcattcctgcattttcccgcggttcctgttgtacaatgggcgtgcgttatgatcgcctataccctgcgttacaggcagttatcgttccggaaattcccgctgatgaagaagccccaactaccccagaagatccaagacaccctcttcacgcacaccaactcgttccgaactctcttaacgtttacttccataatgcacacctaaccgttgatggtgatgcattgctcacactacaagagttaatgggagatatggctgaacgaacgacggccattttagtatcaagcgcccccgatgcgggagccgccacggcaacaaccagaaatatgagaatatatgacggagcgctttaccatggccttattatgatggcatatcaggcgtacgatgaaaccattgcaacgggtacttttttttatcccgttccggtcaaccctctgtttgcatgtccggaacatttggcatcattgcgtggaatgacaaatgctaggcgggttttggcaaaaatggtaccaccaatccctccttttctgggagccaaccaccacgcaactatacgccaacccgttgcctaccatgtaacgcatagtaagtcggattttaatactcttacatattctcttcttggagggtattttaagtttacaccaatatctcttacacatcaactacgaacgggatttcaccccgggattgcctttaccgtagtgcgccaggatcgctttgccacagagcaacttttatatgccgagcgtgcttctgaatcgtactttgtcggacaaatccaagtacaccatcatgatgctattgggggggtaaactttaccctaacccaacccagagctcacgtggacctgggagtcgggtatacagctgtatgtgccacagcagccctgcgatgccctctcacggatatgggcaatactgcccaaaatctttttttttcacgaggaggagtgccaatgttacatgataacgttaccgaatcgttgcgtcgtataacagcatcggggggtcgcttaaatcccaccgaacccctacccatcttcggcggactacgtcctgctacatcggcaggaattgcacgagggcaagcctctgtgtgtgagtttgtggccatgccggtgtccactgacctacaatattttagaactgcatgcaatcctagaggtcgagcatctggaatgttatatatgggtgaccgtgacgccgacatagaggctataatgtttgatcacacacaatcggatgttgcttatacagatcgagcaactcttaacccatgggcatcacaaaaacattcatacggtgacaggctatacaacggaacatacaaccttacaggcgcttctcctatctacagcccatgctttaagttttttacaccagcggaggttaacactaattgtaatacactggatcggcttctaatggaggcaaaggctgtggcgtcgcaaagctccaccgacactgaatatcaatttaaacgccctcccggttctaccgaaatgacacaggatccgtgtggcctttttcaagaagcatatccaccactatgctcaagcgatgcggccatgttacgaacggctcacgcgggagaaaccggggcagatgaagttcacttagcccaatatctgattcgagacgcgtcgccccttaggggatgtcttcctcttccgcgataatttcaccacgcccacatacccactcccaataaaagccctgtagagcgcattggcatcttacttgagatttggatacgctcggccgacttggtctgtttcacgcttccttaaacaacatggctatgccatttgagatagaggtattgttaccaggagaactatccccggcggaaacatctgcattacagaaatgtgagggaaaaattattaccttctcaaccctgcgtcatcgagcttcactggtggatatagcgctgtcgtcatattacattaacggtgctccaccagacacgctctcgctgttagaggcataccgaatgcgattcgcggcagttataacacgggtcatcccgggaaagttgttggcgcatgccattggcgtgggtactcctacacccgggttgtttattcaaaatacatcccccgttgatctttgtaatggcgattacatctgcttacttcctccggttttcgggtccgcagactcaattcgcttggactctgtaggactggaaattgttttccctttaaccatcccccagaccttaatgcgagaaatcatcgccaaagtggttgcacgggccgttgagcgcacggccgcgggtgctcaaattttaccccacgaagttctacgaggcgcggatgtcatttgttacaatggaaggcgttatgaactcgaaacaaatttacaacatcgggacggatcggatgcggctattcgcacattggttttaaatctaatgttttccataaacgagggatgtctgcttttattggcgctgattccaactttgttagtccaaggagcacacgacggttatgtaaatttattgatacaaacggccaattgcgttagagaaaccggccagttaattaatataccgccaatgccgcggattcaagacggccatcgccgatttcccatatatgaaactatttcatcttggatatcaacatcatctagactgggggataccttgggaactcgcgcaattttacgcgtctgtgtgtttgatggaccctctactgttcatccgggagaccgcacggccgtgattcaagtgtaaacaggtgttaataaaaacacaaccagtctagttacatttcacgcgtcttgtttttatttaataggcataaacacggaatccggtatacatgaactgccaatatacacggacataattaatgcaaccatcagatcatctgacattgttcccgtggtacctttacccgtgtaagtttttgtgtctagattacccataccgcctttaattacctctgtcaggttatccaactgtttacatagatactccacggggtctacacctaactttactgttagggatacaagctcctgtgaggctattatatttccggagttaaatcgtttaacaaaatagtctacggccggcgttttttgtttttgtaataaaaaaaaagggtacgccacgctacatccgggaggtatggaatgataaaacagtaacactggagcggaagatagcacgtttcccttttcgaggacagcaaactgttgtgctatagccaacgatatggcaactgcagaatcctggctgctgtttccctctatagaaacgtgtacgtttgtaaatgtattggggtgtaaagcgagtatgtggcctaagcattgagtaacgcaacgccctatctcactggaagacgtgccagttaaagctctaagaaaaaagtgctccaatccaaatataatccaatccgacttataacgaccaacaatcgctacaccagtaccagacgctcgtgtatttgaggtaaatgcagggtctacgtaaacgtacaacactgacgataatatagcacaattcgcaacggttgacggccgatataaaataaacctctcacgggcagtttttgtaaataatggccggtcaaaccccacacccccagaattctgtttacgcccacctacaatttcctgcacgaaggagtcggccataaataaatctgcagtgcgccgcatggctccatccattgtgatgaaaaccggcttatttaatacataacacgaacaagctgtgacatcgctatgtgctaaaacacgcggcatgtgatcgtcgcatacatatgtaacaacgtttaacaactgatccgacgatccacgtaagttatacaaaaaacttgtacttgcttttccggtatttgttgatgaaacaaaaataattttacaattggtttgatttaaaaatccgactatagtttgtacagcatcaggtcgaataaaattagcttcatccacaaacagaagattaaaatcttgacctcggataccctggaacgatagaaagatatatagttaccccaccaaagtttaaatgtatccttaaataccacgtacgtaaaaaatgtttgaatacgtacatatttcttttttttttccagtacaaccatatccggtgtataatggaagcccatttggcaaatgaaaccaaacatgcactttggcataatgatcacacaaaaggattactacacgttgtgatacctaacgcggggcttattgcggccggaatagatcccgcattactgattttaaagaaacccggacaacgcttcaaggttgaagtacaaacaagatatcatgctacaggtcaatgcgaaccgtggtgtcaagttttcgccgcgtacattcccgataacgccttaacaaatctcttaataccaaaaacggaaccatttgtttcacacgttttttcggccacgcataattcagggggattgattttatcattgcctgtttatcttagccccggtttattctttgatgcatttaacgttgtagcgatacgaataaatactggaaaccgcaagcaccgtgatatttgtattatgtatgcagaactaatcccaaacggaacgcgttattttgctgatggacaacgggtacttttattatgcaaacagctgattgcgtatatccgatgcacccctcgtcttgcatcgtctataaaaatatacgcagagcatatggtggcagccatgggtgaatcacacacgtcaaatggggacaatattggacccgtttcatccataatcgatcttgatcgacagttaacttctggaggtattgatgactcccctgctgaaacacgcatacaggaaaataatcgggacgtccttgagctaataaaacgggccgtaaacattgttaactccaggcaccccgtccgaccttctagttcccgcgttgcatctgggttgcttcaaagtgcaaagggccacggagcgcaaacttccaacacagatccgatcaataacggttcctttgatggcgtccttgagccgcctggacaagggcgatttacgggaaagaaaaacaattcgtccgccagcatcccacctttacaagacgttctattgtttaccccagcttcgacagaaccccaaagtcttatggaatggttcgacatctgttatgcccaattagttagcggggacactccagcagatttctggaaacggcgtcccctatcaattgtaccgcgacattacgcagaatcccccagtccgttgattgtagtatcttacaacggatcctctgcctggggaggacgtattaccggaagtccaattttatatcactctgcacaggctattattgatgctgcgtgtataaatgcccgggttgacaatccccaaagcctacatgtgacagctcgccaagagctagtcgcgcgtttaccgtttttggctaacgtcctaaataatcaaacccccttacccgcctttaaaccaggcgccgaaatgtttttaaaccaggtatttaaacaagcgtgtgtgacatcgctaacccaaggtcttataacggagttacaaacgaacccgactctacaacaactcatggaatatgatattgcagattcttcccaaacggttattgatgaaattgtagcccgcacaccagacctgattcagactatagtttcggtgttaacggaaatgtcaatggatgcgttttataacagctccttgatgtatgcggttttggcgtatctgtcatctgtatatacacgaccacaaggtggggggtatataccctaccttcacgcttccttcccatgctggttaggtaatcgttctatatatttatttgactattataattcaggaggggaaatacttaagctttccaaggtccccgttcccgtagccttagaaaaggttggtattggtaattccacacaactgaggggtaaatttatacgcagcgcggatattgttgatattggaatttgttctaagtatttacccggtcaatgttacgcgtacatttgtctaggatttaaccagcaattacaatccattttagttttaccggggggatttgcggcatgtttttgtattaccgataccctacaggcagcactacctgcatcgttaatcggacctattctagacagattctgcttctctattcccaacccccataaataaattagtgtcactataaaaacataacaccagaatctcttcatatgtaattttacgtcatttctcccgtttccaccccctcttaaaatataaaataaccgggtgggtggcattaaacccacaagtacccgggcggcaatccgctagactgtttttctgctcatggaattacaacgcatatttccgctgtacaccgctacgggtgcagcgcgcaaattaacccccgaggcagttcagagactctgcgatgcattaacgctggatatgggattatggaagtccatcctgaccgatccccgggtgaaaataatgcgatcaactgcttttataactttaaggatcgctccgtttatcccccttcaaacggatactactaatattgccgttgttgtagccacaatttacatcacgcgcccacgtcagatgaacttacctccgaagacttttcatgtaattgtaaattttaattacgaggtctcgtacgcaatgacggcgactttaagaatttatccggttgaaaacatagaccatgtttttggagcaacgtttaagaacccgatcgcgtacccccttccaacatctattccggatcctcgagcagatcccacccccgcagatcttacaccaacgccaaacttaagcaactacttacaacccccgcggcttccgaaaaatccatacgcatgtaaagttatttctccgggagtgtggtggtcagacgaacgaaggcgtttatatgtactggctatggaacctaatttaatagggctatgtcccgccggatggcatgctcggatacttggctctgtattaaatcgactcctcagccatgcggacggatgtgatgaatgtaatcatagagttcacgtgggggcactgtatgcgttaccccatgtcacaaatcatgcggaaggttgtgtgtgttgggctccgtgtatgtggagaaaggccggtcagcgggaattaaaagtggaggtagacattggcgccacgcaggttctttttgtagatgtcaccacctgcattcgaattacgagtactaaaaatcctcgcattaccgcaaatcttggcgacgttatagcgggaaccaacgccagtggtctctctgtaccagtaaattcatctgggtggcagctttatatgtttggagaaacattaagccgggctattattaacggctgtggtctgcttcagcgaatttgcttccccgagacacaaagattatcgggtgaaccggaacctacaaccacctagtataccttaactcaaccgccgttgtggaaaggtatatgtcaacatttacagtaatatattaaaggttaaatttataaaacactcacgtttgtgttgtgacttgacgcgaacaccgctgtgctgtaagacccgtcggtaaatgaaaacgtaatagattcgccttttacatgatccacgtaatttgccccaaaccactgttccaggcgagacttgataccctcaaacacgggttccgttgctttgcgtatatgagccgtataacccactttaattcctctaaacgtggccattactaaagctattaatggtacaagaaaccatgttttcccatgtctacgtggtaccaaaaacacagttgatttttgtttgaagtgttctaaaacactgtcagaaacacttggcgtgttaaacactgtacgcagaaagcagtcaactctgtcggcatgatcgcccaatagcaccgatgaaataaaatgcgtggtgtgcatgaggatcattttttgaaacagttccaacgtccccttatatctgccatagattggaacgtcaacctttgcgcgtttgccatgacttccacactcttcaatactctcaaaagatgtttccacaaggtacgaaaaccgttgtgtaaaggtagacaactgacagaaactatccgacagagaaaacgcgcgaaatgtgttcataacaccgctatacgcatttcgatgaggtgctgcttcttccggtgaatattcataaaactgtacactactgacagccttttttaattcagggcttacgtttgcatttaccgaatatcgccatggtttcaaaactacattgggggtacagttgtaccctgttgacgatagaaacgcgccaaacattgcccgtcgagcagtagccgagaacagtggaatatattcacaacagttgtgaagcgttccaattccgggaataacggcctgatgacgtcgggttacatctatagcaaaattcagaaacgggatttgggttgcgtttcccagagacccttgccgcgtggaacacggggtaggggactccaacgtcccaaagcgttcatccctacgacgctttagacgttcaaaatatcttacagattcttcaccaagcgtacgaccaaacattatcaatgacatttaacatcaattcacggaatccgcctcatctcttgtaagcagtaaaacaggaagccgcgtcatcttacgtactcgttacgtatatatcataaacattttcagggccgcattcattcactttggtcatgtcaggccacactccaacctacgcttctcataggcgtaaccgtgtcaaactagttgaggcgcataaccgcgcggggttatttaaagaacggaccctcgatctaatccgtgggggtgcgagtgtacaagatccagcatttgtgtatgcctttactgctgcaaaagaggcctgcgccgatttaaataaccagctccgctctgcagctcgcatagcttcagttgaacagaagattcgtgatatacaatccaaggttgaggaacaaacaagtattcaacagattttaaatacaaacagacgctatatagcacccgattttattcgcggtttggataaaacagaagacgataataccgataatatagacagactggaagacgcggtaggaccgaacatcgaacacgaaaatcatacttggtttggagaagacgacgaagcgttacttacacaatggatgctgacgacacaccccccaacctccaaatatctccaactgcaggacctttgcgttcccaccacaataccgacggacatgaaccaaatgcaaccgcagccgatcagcaagaacgagaatccaccaaccccacacacggatgtgtaaatcatccatgggccaatccgtcaactgcaacatgcatggaatcaccagaacgatcacaacagacaagcttatttttattaaagcacggcttaacgagagatccaatacatcaacgcgaaagggtggacgtttttccacaatttaacaaacccccatgggtttttagaatttccaaattatcccgtttaattgtacccatcttcacgctcaatgaacagttatgtttttctaaattacagattcgagatagacccaggtttgcgggacggggaacgtatgggcgtgttcatatatacccatcgtcaaaaatagctgtaaaaaccatggacagtcgtgtttttaatagagagttaattaacgcgattttagcgagtgagggttctatacgagcaggggaaaggctaggtatttctagcatagtttgccttttaggtttttcgttacaaaccaaacagctactgtttccggcatacgacatggatatggatgaatacattgttcgcctgtccagacggttgacaatacctgatcacatagacagaaaaattgcccatgtatttttagatttggctcaagcgttgacgtttttaaatcgaacgtgcggcctgacccacctagatgtgaaatgtggcaatatttttcttaacgtcgacaactttgcctcgttggaaataaccacagcagtaatcggagactatagcctagtaacattaaatacgtattccctttgtactcgagcgatatttgaagttggaaatccatcccacccggagcacgtactacgcgtaccccgggatgcatcgcagatgtcatttcgtttggtgttgagtcatggaacaaaccaaccccctgaaatcttgcttgattatattaatggaacgggccttactaaatatactggaaccttgccccaaagagttggacttgcgattgatctttatgcattgggccaagcactcttagaagttatcctgctaggacgtcttcccggacaactgcccatttcagtacatcggaccccgcattatcactactacggtcataagttatcaccagatttggcgcttgatacgctggcatatcgatgtgtcctggcgccatatatactcccatctgacatccccggggacttaaattataatccctttatacacgccggagagctgaacacccgtatttcccggaattctttacgccggatattccagtgtcacgcagtgcgttacggcgtaacgcactcaaagcttttcgaaggcatacgcattccggcctcattatacccagccactgttgttacatcgttgttgtgtcacgataattcagaaatacgctcggatcaccctttattatggcacgatcgggattggataggatcgacataagcccccagccagccaaaaaaattgcccgtgtgggaggtctacagcacccttttgtaaaaacggatattaacacgattaacgttgaacaccattttatagacacgctacagaagacatcaccgaacatggactgtcgcgggatgacagcgggtatttttattcgtttatcccacatgtataaaattctaacaactctggagtctccaaatgatgtaacctacacaacacccggttctaccaacgcactgttctttaagacgtccacacagcctcaggagccgcgtccggaagagttagcatccaaattaacccaagacgacattaaacgtattctattaacaatagaatcggagactcgtggtcagggcgacaatgccatttggacactactcagacgaaatttaatcaccgcatcaactcttaaatggagtgtatctggacccgtcattccacctcagtggttttaccaccataacactacagacacatacggtgatgcggcggcaatggcgtttggaaaaaccaacgaaccggcggcacgagcgatagttgaagcattgtttatagatccggctgatatccgtactcctgatcatttaacgccagaagctacaactaagttttttaattttgacatgctcaataccaaatctccaagtctccttgtgggtacaccaagaatcggaacgtatgaatgtggacttttaatcgacgttcgaacgggacttataggcgcgtcgttggacgttcttgtatgtgacagggaccctttaactggcaccctaaatccccaccctgcagaaaccgacatttcattttttgaaattaaatgtcgtgctaaatacctctttgatccagatgacaaaaataacccgctcggtcggacgtacaccacgttaataaatagacctacaatggcaaatctacgggactttttatatactataaaaaacccatgtgtaagcttctttggaccctcagcaaacccaagtacacgcgaggccttaataacggatcacgttgaatggaaacgtttaggatttaaaggtgggagggcccttacagaactcgacgcccatcatttgggcctcaatcggacaatctcatcccgagtgtgggtatttaatgatccggacatacaaaaggggacaattacaaccattgcatgggccactggagatacggctcttcaaattcctgtatttgccaatccgcggcacgctaactttaaacaaattgccgtacaaacctatgtattatccggttactttccagcgctaaaactacggcccttccttgtcacctttataggacgtgtgcgccgaccacacgaggtgggagtcccattgcgcgtcgatacacaagcggctgccatttacgaatataactggccgactatcccaccccactgtgcggttccggttatagccgttctaacgcctatcgaagttgatgtgcctagagtgacacaaatacttaaagacacaggaaacaacgcgattacatcagcattgcggtcattgcgatgggacaatcttcatccagcggtcgaggaggaatctgtggattgtgcaaacggtacaacgagcttgttacgtgcaacggagaaaccgttgctttgaactcagagttctttgaagactttgactttgatgagaatgtaacagaggacgccgataaatccacacaacgccgcccacgagtgatcgatgtaacaccaaaacgaaaaccttcgggaaagagctcccattccaaatgcgcaaaatgttaaaccctgataaaccctgataaacgttctaataaaaacatcaaatcatggttggttactgtgaatgtttgttttattgcttgggggtttacaagtacaacccacgctactcccacccactgtttgatcgctcgtataacagctcatcctcgcggtccgtttcatatgttgagtcattttcatagacgtagccgtagccttgtgatgggtaatttgtgcggcgagaatttctatgtgcaggttttacttttcgtatgtatccccgtacccgctcgggtactcttcttacggcaccgtagaaccgactgcgtttctgtcgatgatacacatatgcacgcatcaatctgagaagcaacatgacaacggaaaacacggccaggcaagccaaggttccccgagttgtgggaattaaccgtggagattgaaccgatatagggtcatataatcggtccatatacgagtgcgcggcggttcccaacgtagcacaggccacgagcgttcccagggacggtcctattaacacgtgtatataatgcgccaaaattaattctgatactataagatatacaactgacaatgtactaaatgtagacatggccacggacaccgatgaccacagtcccgtatgtagatgattcgccaccacaagttccagcattaatgatacaaataggatacatatcgccatcaacgcagccatcaaattcacgaacactgcgcgcgtaggccccgcaaggcgatataaaaagacgctctgctgtcgtaaatttgcgaccgcttttatgttcgtttcgtccaattttccgcgtccacaaaaatacgttgtaaatattacacttgtcgcaaaatgtccaagatataatgtagcagccacgccgatttgcttgtaagctaataataacacaacggcgtttaataaccacaatgacaaaagaccccaaaaaagtgttgtgggatctacaactaaccatgcaacaccggagctttgccggacacgttgatttttcgtttctcggtgtataatcgcggccgtgatcagtgtatataccgccatggccattgccgttaaagccgtgtagtaagtaaatgccacaacgctatgtggttccaaaaacaaaaccggggcgctgtatccacctctatttccggaccatacccccccatctagggtggcgttaaataactcataatcaactacggcagcataaaaacaagggatcccggtatattcagaagaggcggcaattaacgtagccaggagcattaccgcacccaaagtgaacatcatcacctgaattatccaaattcgccaattaagcgtatccatttgatgatctaacgcttccacctcgggtgtcgtggtgtcgtacggcgagactttttcagaacgcggccccttcttttgagttcccatgtctcccaacaccggggagagcaacgccgccgtctatgcgtccagtacacagctcgcgcgggcgttatatggaggggatctggtttcgtggattaaacacacccacccgggaattagcctggaactgcaattggatgttccagtaaaactaataaaacctggtatgtcacaaactcgcccggtaaccgtcgtacgtgcccctatgggctctggtaaaacaacagccttgcttgagtggcttcaacacgcgttaaaggcagatattagcgtactggttgtctcatgtcgccgtagctttacccagacgttgattcaacggtttaacgatgcaggcctctccggattcgtaacatatttgacatccgagacatatattatgggttttaaacgtttgattgtgcaacttgaaagcctacaccgcgtatccagcgaagctatcgacagctacgacgtattaatactggatgaggtaatgtcagtgattggacaattatactcccccacaatgagacgtctttccgcggttgatagcctattatatcgtcttttaaatcgctgttctcaaattatcgcgatggatgctacagtaaactcgcagtttattgatttaatctccggattgcgtggagatgaaaacatacacacaattgtgtgtacatacgcgggagttgggttctccggaagaacttgcacgatcctgcgtgatatgggcatcgacacgcttgtgcgagtcattaaacgatctcctgaacacgaggatgtacgtaccatacaccaactacgtggaacattttttgacgaactagcactacgattacaatgtgggcataacatctgtatattttcatcaactttatcgttttcggagctagttgctcagttttgtgcaatatttacagactctattcttattttaaactcaactcggcccctatgtaatgtaaacgaatggaaacattttcgcgtgttggtgtacactaccgtcgtgaccgttggattgagttttgacatggctcattttcatagcatgtttgcttacataaagccaatgtcatatgggccggatatggtatcggtctaccagtcattagggcgtgtacgtttattgctacttaatgaagttttgatgtacgtcgatggctcaaggaccagatgcggacccctgttctcgccaatgttactaaactttaccatcgcaaataaatttcaatggtttcctacacacacccaaataactaacaaactgtgctgtgcatttaggcaacgatgtgcaaatgcatttacacgctcgaacacccatctcttctcaagatttaaatacaaacaccttttcgagagatgctctctttggagtttagccgatagcattaatatcttacaaactcttttggcctctaaccaaattttggttgtattggatggcatgggtccaataacggacgtttccccagttcaattttgtgcatttatacacgatctcagacatagcgctaacgccgtagcttcctgtatgcgttctcttagacaggacaatgacagctgcttgaccgattttggcccttccggatttatggccgataacattaccgcgtttatggaaaagtatcttatggagtcaattaataccgaagaacaaattaaagtatttaaagcccttgcatgtccaatagaacagcctagactagtcaatacggcaatattgggggcgtgtatacgaatacctgaagcgttggaagcatttgacgtatttcaaaaaatatacacgcactacgcttccggttggtttcccgtcctggacaaaaccggggaatttagcatcgcgactataactaccgccccaaatttaaccacacattgggagctgtttcgccgttgtgcctatattgcaaaaacactcaagtggaatccgtccaccgaaggctgtgtaacacaagttttggatacggacattaatacacttttcaatcaacacggggattcgctggctcaactaatatttgaggttatgcgctgtaacgttactgacgctaagattatattaaaccgcccggtttggcgaacaaccggattcttagatggatgccataatcaatgcttccgtccaatccctacaaaacacgaatataacattgctctatttcgtttaatttgggaacaattatttggcgcccgcgtaactaaaagtacccagacctttccgggaagtactcgtgtgaaaaacctaaaaaaaaaagatctagaaactttacttgattcaattaacgtggatcgttctgcatgtcgtacctaccgccagttgtataacctgcttatgagccagcgccattcgttctctcaacagcgttacaaaattactgcccccgcttgggcacgccacgtgtattttcaagcacatcaaatgcacttggccccgcatgccgaagccatgctacaattagcgctatcggaactgtccccgggatcgtggccgcggataaacggggcggtaaattttgaaagtttataacccgttaataccatatatggacatccatagggggggttacataaatactaagcctctgtacaacacaaagggcctctaacaatgcactgaaccacaaccaagctatggacgcaacgcagattaccttggttagagaaagcggacacatttgtgccgcaagcatatacacatcctggacacagtccggacaattaacacagaacggtctttccgtgttatactacttattatgcaaaaactcatgtgggaaatacgtccctaagtttgccgaaattaccgtacaacaagaggatttatgtcgctactccaggcatggggggagtgtttctgcggcaacgtttgcgtctatctgcagggcggcgtcctcggctgcgttagacgcctggccccttgaaccactgggtaacgcagacacctggcgttgtctccatggcactgccctggccactttacggcgcgtattagggtttaaatcgttttattcgccagtaacattcgagactgatacgaatacaggtcttctgttaaaaacaatccccgatgaacacgcgttgaataatgacaacacgccatctaccggagtattgagggctaattttcccgtggccattgatgtttcagcagtcagcgcatgtaacgcccacacgcaaggtacgtcgctagcctacgcccgcctgaccgcacttaaatctaacggtgacacccagcaacaaacacctttagacgtggaggtaattacaccaaaggcctacatacgtcggaaatataagtctacgttttccccccctatagagcgggaaggccaaacctccgatttgtttaaccttgaagaacgccgcttggttcttagtggcaatcgcgcaattgtggtaagggtactcttaccgtgttattttgactgtttaacaacggattccaccgttacatcttccctttcaatattagcaacatatagactgtggtacgcggcggcgtttggaaaacccggggttgtccgtccaatctttgcgtatttaggcccggaactcaatccgaagggtgaagacagagactacttttgtactgtcggatttcccggatggaccactcttcggacacaaactccagccgtcgaatctattcgcacggctacggagatgtacatggaaacggatgggttgtggccagtaaccggtattcaggcctttcattatctagccccctggggacagcatccccccttacctccgcgggtgcaggatcttattgggcaaatccctcaagatactggacatgcagatgcaactgtcaattgggacgcgggccggatatctaccgtcttcaaacagcctgtacaactacaagatcgttggatggcaaagtttgatttcagcgccttttttcccacgatatactgcgctatgttccccatgcattttagattaggcaaaatcgtcctggctagaatgcgtcgaggaatggggtgcctaaaacccgcgttggtgtctttttttggggggttacggcacatactcccgagtatatacaaagctattatttttatagccaatgaaattagcctttgcgtcgaacaaacggccttggaacagggctttgctatatgtacttatataaaagatggattttggggaatcttcaccgatttacatacgcgcaatgtatgttcagatcaggcacgttgttcggccttaaatttagcggccacctgcgaaagagcagtcacgggcttattacgaattcaactaggtcttaactttacacccgccatggaaccggtactccgggtcgagggtgtgtacactcacgcatttacctggtgtaccacgggaagctggctgtggaatttacaaacaaacacgcctccggatttagttggcgtgccatggcgaagtcaggcggcgcgagatttaaaggagcgtctttcaggactcctatgtaccgcaacaaaaattcgagaacggatacaggaaaattgcatatgggaccatgtcctatacgacatatgggccggacaagttgtggaggctgccagaaaaacatacgtcgatttttttgaacatgtttttgatcgccgttatactccggtatactggagtcttcaggagcaaaattcggaaacaaaagcaataccggcatcttatctgacatacggacacatgcaagataaggattataaaccaagacagataattatggttcgtaatcccaacccacatggacctcctactgttgtttactgggaattgctaccatcgtgtgcctgtattccccccatagactgcgctgctcatctcaagccccttatacacacgtttgtcactattattaaccatcttctagatgctcataatgatttttcaagtccatcattgaaatttactgacgatccccttgcttcatataacttcttgtttttatgacaaaaaaacacgccgcaacaacccatccttaaaataaaaggtttatttactttacaacccgtggtgaatttttatacgtttcaaataactgaacatttttcggtgttaccatggtgcgatttaaccaccaaaaatatacgctcttctgatattccgaatctcgtaaaggtccatttaacaatcccgggggtacttgcaccacaccatctggacaggggggggttccgtggggcaggtcaaaacgctgacccaccccacatgaatatatagcctttataatattgggggccgttccaggctgagggttcagtaacttaacaaacatataatgcggcaatacgcgggtttttgtaaaggggttgttatcaacgacatacattagagtgtttaacaaccataaaactccctcatataaaaaccgacgcattttttccaaaggtcctatttgacactcaacgcgtctaagatatacagacaattgtacaaacagcgatggagatgccccggagggcccaatgccttccagatacattaaaataacacataaggtaaaatctaggacattatccgggcggaatagagtcatccgatagattaacaggcgcggaggcacccccaccgtatacaccctatcttcaaccgcagttaatacggaaaaaataaatccgcggaacgctggttgagtaacacactccatgtagtaacgatcacaggacacctcacttgaatcaccattcaacactactaaaacggtctcttggtgttccggttttacgcgcagtgatacaacagagtttgccaaaaagcgtggcttcaaaccggttacctcccgcgcctcgcatacgaatcttggtattgcttgtattctaagatcttcgatcacgtcgctcacatccaacccctcttcggctcgtgttagtaagttgtcgatcgttacgctgcaacctaaaatgctgggtatatttattccggacatcccatcggccatccccgcgcctccggtttgctcgaattttatccagtaaggtcgaatccgctgcatttaccttgtgtacccgtaacctctcaggggggtgtcctttcataaaatgggataggtttttatatccaacatgcatgtattggttatttattttattgggttccgggattctttcgtcatcttctgtagggtcaggcaaaccccaggaaggacttggtgttctccgtgggccccgttttattacctctgcgcgaacctgcatttcatataatattcggatttgggataaataggactctgttctcgcctttttaaaaatagcctggcataactcttcctctgacctatgtacctcgctttgagttaccaagaatcctaatcgggtggcccgtaatatgaatgaaaaatacggcgcaactagtaatgagattgacgcatttgaatatgatacagaaatttcctggccttgattattgtttacccggtgaagcttaaaacagcgaacaagttcctgtttccatagctcagacaaacgttttatatcatctccataaggggggatataacgagattgaaaactattggcaatatatgcatcatcccctattatgccggtaagatctataacctcgtgatttaaatcggcaatacgtgtttcttctgccattgtaatatgtgaccctttagatggctttatttttaccctctcttcccgtaaccgtttcagctctccttctttgaactggagcctttcggtcagatcgctgttcacatccttgagaccctcaatggttttgaataaattattcacataaccctcgagcatgccgttgatactgttaaccaccgaagttttaaacgcactttgaacgtttgttgttccggacattgcccccccgttaaaggattggttggccttgccaaaccccggttgtgatgtgtccaccgatccacttccttccagaatgtgattgcccgtttcttctagataggaacgtacggtttcggtaatatctccaacatgtctcatgttttttaagttaactattagctttacaagtctagacgcggccgatccagcccgtgttgtatcgttctcgcccattatacgatcaaccgcacgtgtgctgtgagatctatcatcttcattccggcgacctattaacacgcgcaaaggggctgtatttaaaacttggcagacgcgagcatgttcacgtaatgcataacaggccaacacctccccagaaagccgctgtaagggtgagtcaaatactacaccctccccacatacaacgggcggccacacgaccaaacactctcccttcatgcccgttacatcatcctttgccataattaatcttcggttataattataataaagacgcgtcctatcataatccataatagcaacattttgcatacactcaactaggcttgtgacaaccgccgctcctctggccaacgttgcatcggcaacttttaacatctgggacagttctgccgcttgacccatatacgtatttaatggtgcaggggttccattctgttctgatcgtacctttcttacaacgggcacaatacctacacaggctatccagtccacgtatttggcaaaaccgacccttccatttaaaccactggtatagagacaaccggttattccacgcagaaactcaagtaacgatgactgtaatgtttgacgccaggtttcaaaaacctgatgtgcaagccgtacggcttctgattctccacatagcccataacgttccgctagagccccggcatgcaggttacattgttggatgtggtgttcccaatctgctgctaggtcctcataccgagttgcatccaacgcgttcatcaaaacggttgcctgaacttggcgaattacagtttccgtagaccgtacagcgctatatatgccttgtccatcggtatatccaaagtcaccggctaggatttttcgaaacaacatactttgcgtggttgggtgtattaacatccagccatcttcctccggaaatgtacaaaaccctatatccggggcgtactcattccagtatatatcgaacatgttcttgtattggtcatttgggttacttccattcaagccctggtcaatagaaacagaacttgctatccttttttcttcactaccggaactgttattaaaaagagacgttatttcggccattgaaaaccacgatgaaaagatcaatttctgtagacagttcttcacccaaaaacgtttttaatccagagacgcccaatggatttgatgacagtgtatatttaaacttcacctctatgcatagcattcaacctatcctctcacggattcgagaacttgccgcaattacgattccaaaagaacgtgttccgcggttgtgttggtttaaacagttactcgaactgcaagcgcctcctgaaatgcagaggaatgagctccccttctccgtttatttaattagcggaaatgccggctccggaaaaagcacgtgtatccaaacgcttaacgaagctatcgattgcattattaccggatccaccagggttgctgcccaaaatgttcatgctaagttatcaacggcttatgcgagtcgtccgataaacacaatctttcatgaatttggttttcgcggaaatcacattcaggctcagctgggccgttacgcatataactggactacgacccccccttctattgaggacctgcaaaaaagagatattgtatactactgggaagttttaattgatataacaaaacgagtgtttcaaatgggggacgacggtcgcggaggaacatcgacatttaaaaccctgtgggcaattgaacgtttgcttaataaacctacaggctcaatgtccggaaccgcgtttatcgcatgcggttcccttccggcttttacccggagcaacgttattgttattgatgaagcaggattgctagggcgtcatattctcacggccgttgtttactgttggtggcttttgaatgctatatatcaaagccctcagtacataaacggtcgaaaaccggtcatagtatgcgtcggttcgcccacccaaactgactcgttagaatctcattttcaacatgacatgcagcgttcacacgtaactcctagtgaaaatatactcacgtatataatctgcaatcaaactctgcgtcaatatactaacatctcacataactgggcaatctttattaataacaaacgatgtcaagaggacgattttggaaatcttttaaaaacgcttgagtacgggctacctattaccgaagcacatgcgcgtctggtcgatacatttgttgtacctgcatcctatattaacaatcctgctaatcttcccggatggacgcgtctgtattcgtcgcataaggaggtgagcgcgtatatgagtaagttacacgcgcatttaaaactatcgaaaaatgaccatttttctgtgtttgccttaccgacttatacattcatccggctaacggcatttgatgaataccgcaaattaacgggacaacccggactttctgttgaacattggatacgggcaaactccggtcgtttgcacaattattcccaaagccgagatcatgacatgggaacagttaaatacgaaacacattcaaatcgcgacttaattgtagcccgtacagacatcacttacgtgctaaatagtctcgtagttgtaaccacaagactacgtaagttagttattggattcagtggtacatttcaatcgtttgcaaaggttttacgtgacgactcctttgtgaaggctcgaggagagacatccatcgaatatgcttaccggtttctgtcaaacctaatctttggaggcttgattaacttttacaattttttgttaaataaaaacctacatcccgataaggtatcgttagcatacaaacggttagctgccttaaccctggagttattgtctggaacaaacaaagcccccttacacgaagcagcggttaatggggcgggtgccgggattgactgtgatggtgcagctacttctgccgataaagccttctgctttaccaaagcccccgagtccaaagtaacggcctccatacccgaagacccggatgatgtaatttttacggcacttaacgacgaggttattgacttggtatactgccagtacgaattttcctatcccaaatcatccaatgaggtccatgctcagtttctgttaatgaaagctatttacgatggtcgatatgccatattagcagagcttttcgaaagcagctttacaaccgccccctttagcgcgtatgtcgataatgttaatttcaacggaagcgagcttttgatcggcaatgtgcggggggggctgttatctttggcattacaaacagatacgtatacccttttggggtatacttttgcacccgtgccagtctttgtagaggaactgacccgaaaaaagctgtaccgcgaaactaccgaaatgttatatgctctacacgtacctcttatggtcttacaggatcaacatgggtttgtgtccatcgtaaacgctaacgtatgtgaatttaccgagtctatagaggatgcagaattggcaatggccaccacggtggactatggccttagttctaaactagccatgacaattgcacgctcacagggtctgagtttagagaaggtagctatctgttttacggcggataaactgcgcctaaatagtgtgtatgttgccatgtcgcgtacggtctcctctaggttcttaaaaatgaatctaaaccctctacgggaacgatatgaaaaatccgcagaaattagcgatcacattcttgccgctctacgtgatcccaacgtacacgttgtgtattaaagcattgtataaaaacacgcatgcgggcttgctgttctcatttctaggttttgtcttaaatacacccgccatgagcatctctggacccccaacgacgtttattttatataggttacatggggttaggcgggttcttcactggactttaccggatcatgaacaaacactctacgcatttacgggtgggtcaagatcaatggcggtgaagacggacgctcgatgtgatacaatgagcggtggtatgatcgtccttcaacacacccatacagtgaccctgctaaccatagactgttctactgacttttcatcatacgcatttacgcaccgggatttccacttacaggacaaaccccacgcaacatttgcgatgccgtttatgtcctgggtcggttctgacccaacatctcagctgtacagtaatgtggggggggtactatccgtaataacggaagatgacctatccatgtgtatctcaattgttatatacggtttacgggtaaacagacctgacgatcagaccacaccaacaccaaccccgcaccagtatacatcgcaaaggcggcagcctgaaaccaactgtccttcttcaccacaaccggcctttttcacatcagacgacgacgttctttcgttaatattacgggacgccgcaaacgcgtaaagacagattcaagactaacatttatcccaactgattacatttcatacgcgaataaacgacacaaaaaatttatatttaacggcttttaatttgaagacacctatcctcttaacgttgatgagccttgcaggttgggtgccgcgcttcaccggtattatacataaccgatttaccgtgtttacggcagtctgaccatttaccagtgtatgtctgtaatacgacgttgttgtgtcccgacaaaattaactcgcgtacaaatttctgatgttcccccggcgtggcaacgctggcatttccaaacacattacgttctcgtacgtccatgaccgctattttcagtattaattggttggtcggtcaaagtattttccttatgtaaaaggacacgatctaaagccgtaaactcatacacaaacactggtaccaacggacgcgattttccgtccgttgagcgggtgtaatatcggcgaggtcttcttgcacgaatactctcgtacagtaggtttctgacacggggtgcatgggttttttgacacaacacaaacatttgcaggctcttatgactggatggattgaatttatttttagatagggtcacgtgtttttgtcgtgacacgcctcgaccagaaaaggctgcggttttcgtacacgcgaccgttatttcacaggcgttcataaccaagctgcggcggatggtgtcggttaattgtctccgcccaagttcgtcaatagatgataccatgaacaacgtatcaaatggtacatagtcgtctttggttttctcaatacagcccgcgtgcccaatcggaaatttttcatttgcatcaacgctattttctgtaaaatcgttctgaacactgtgttggctggctacctgtttaaaatttgggatcgaacacggtccacgatgcaatccccaaccccattgaagcaatgccgtcggtacggaaggaggcaactccgaaaacattatggtacgcaagagggtcgattggagtgttatataacactccaatcgatctcgggttcgcctttacgcgtaaaatactcattggcttgaacgaaatgtcgacaattccgaaatggaacacgggacaatggcgacggatgcgcgtgtgttagcaccagatgacatcttgaattcggttgggttgtcttctgtgcatgcgcaccccacagcataaaaactaaccctgtacggttctcgcataacctctgtagcacgcgttgcaccagccgcccccagcctaagtatacatgcgaccccggagtcccgcgacgaaccgtaagcgtggtattcagcaataacaccccctgccttgcccaactctccaggcatccgtgagtgggcggagtcatatttgggtatgattccatgagggccgcaaaaatatttttaagactagacggtggtgttatgccacgttttacactaaacgctagcccatgtgcatgtcccgcggtagggtatggatcttgaccaataattacaacgcgaatgctctggggtccgcaaaatcgcgtccatgcaaaaatatcgcctgtagatggaagtatttcttcccctgaatttaaaagacgattgtattctaaaaaaatacctttcgcgtacggctctttaagttcgtccgacaacaggtcataccactcaggggaaatgttaaacttgctgaaaacttcaaccgaatccagttgcgaagagacgggggtgaacgtttccgtgtcgtaatgatgtgacatgttatttaacttgaaggttggggggtctagcttaacccccaaaggcagcccgcggggtcgcttgcgggtttttttggtaaccggatgggccaaaacataaatgtcctttgaatccgatagtttcatttcattggcatacgcgttggaacaaacggtcggctccccagacacatccattttccgggatatttgtggaagatggagtagagtctacccatacaccggaaagggcatccaacaaagcatcgcgtatgtccccgcttttatgttcttcaccaacagattgtgccagcccctttaaggtgacgtatggatttgtccagtacgccatttgtttgtctttaaaccaaagtataacttccggtactggacattttgtcttaaccacgattcccgatagcgcctcgctgaggtttgataccgggggtgccgcatagtcccacgcctcatataccgatgacacgcacggttccgttataatcaaactcacatccgatagcggtttggctccaaaaaacaacggagtgtcgtcttggagatgaagacaatacgcgattgtgatagtttttaaaaaaactatctgcagtaaccatttatgtgatgccatgacgcttgtgttttcccttcactacgacgttgtcgtatcctttgaaaaacttgaccactctaatggaagcatggacaagtatgagttttatatatacagttggcctttagttaaactcttggtgtcatatctcattttcctaaaaagggcgatcttaatatgtcaaacgtcacggcgtgccgacaaagcgaatttccatgcaagatttggatgtagtatttatacacccaatcacatgtcacgtattaagctttacagtcccccgttatctgatataatcacttttcttaacacgtcatcgggaaaacagatgtttatattatacctctcgcggtcatttacggcaaatacttagaccgttttcaagcggactgaaaacgctcaaattgccttttggaggcctgcccaacggccattatcccttggatctaagattgatttgcggtaacgtttgccaatcaagctttaaaaacgtaccccaaacttaaaacgctcaaattgccttttggaggcctgcccaacggccattatcccttggatctgagattgatttacggtaacgtttgccaaacccacgcatttcagtttaaatatttctaagcattcttagtgcgtacttggcagcgtgcttaaaatatcaaccaatatccattatgctacacgtttccttctatccgtttcaatccattaaaagtccattaacaaaaatgatgcatcatacctaattcacctaaaaacctgactcattgcagcagcgtttcctccttgcagactatccagttggcattttaaacgggtccggctgcctaaaccgaaaacaccgttgcctttactgtaagtacaaaactaaaatttatatttgcgtgcgtattttgtaacatatatgccttttatccccccgcaagtttgctttaccctcgccttcaccacccccgccaccttccggccattttaataactttaattgctataagacatacccaaaccggatgatttttgccgctggaaaaacagcttctaattttcccgtctcaactcggccttggttgcatctccaagtatacctttagtttgctcccgtagaggtgtataaatacaaacggtgacaagtattgagcgtaatctcaaatttttgtaatttagggcggagcgcttacgacagcacatgcgtactgttagactgttatgtttattgtatttgcagagcaggatgccccggttactccgagaccggattgcgggcattccgaatcgtgtacggacttaccagggggcagtatttacaccttgggttccagatataccaacccttacgaccaatagcaacactcaggtatttttaaaatgcacgtttaatgatcataatttacatacagttggtaataaagcagactgtggatgtttaaggcatttccttccccctcccaacaaactaggacttcttcatcttgtttggaatacctttacccgctttaccggcagagctttttttggtaaggtgtttcagtgaacctgatgttgatccggaggtggagggggtattggactccccctgtggagaggcaactttgcgggttttacttcccttacatgccgaatcagactcagatgtcaggtctattgttaagcatcgtttaacgtctctgccggtatgaaataaacggcgcttagcaccccttgcgcttcccggtttaatccccggtaacacagaaaaaagcctgactttttggggtgtatttaccaatcgggtatccctttcatcgccacgagaggtctccccggttgaggtggtttctggtcttacaattggacctgtaattagttggatggctgtatctttccaggtccaggtttgcatggttaggcgggttggatcggtacatcgatccaacaagaataacatgtttgttacaaacggtcctgttgaatcatgcaaaagacaacgcagggatgtttttaatcccgcctcatcacgcccgtaaatacctatatagtttaatatcaacatttttgtaggctctacaatttcgggttgatacagttccgcaagttgatcatcaagccatccgagtaaaggttgcatgtaacacgggaatctcgcgtttccctctgttcctctatccgtggctcgaaaaggcagtctgtccatggttcgtgggtcttgattaattcccacagatactggacgatcacggtagtcctgccccccggtccggggttgctgtgcagattcaatcgagccatacaccaccggggtcgccgatcgaacagcaggttggtctttaaaaaataccttccgtaaaaatgatgcggtagagcatgttttggttacaccagggctcgagtctcgggtcggtggttgtatagaatcctgttgagagtcacttggtgactctgctgtgggctctctagccgacgattgaaggggcccagggtttggtgattgaatgggctcccgactcgatcttgatgttggctgttggatggactcccgactcggtcctgggcttggtggcagaagatctatgacatctcccggtaggatgtcgatggaatcttcaaatgacggctcagaaaaaccatcgtcgtcggatgggtgcacttcatattccttgtaacttgtatcacttacgatcttatgcaggatggattgcactggacaccggcagagaggacactggacgctggtggaggtccatgcccgaatacaaacaaagcagaagtcgtgcaaacacggcatggtttttccgagatcggaaacggtgctcatgcatatggtgcaggtattatccgaagcgtcggaggtgccgctaccgcccgctaatatggtatccatggtaacaactggctgtattctaatgtccgggcatccaaacacgtagcagaactgccatgcgttctaaattgtgagttgtggcgagtacatttttataattggtaccaacgaagacacacccctatatccctccacccatttcttttaagtcccacccactaaaacgtgggtataaaatgtgtattggggtaggcggacagtcccaacaaacagggaagttgattggtataaccttgggccgggtatacagctaagtgacattttagattctgtctttatttagataaagagcgatacgaagacatttctccacccccctgtaatacccgtaaataaaggtaagtccacaaacaaaagcactgtatataggaagtcgggtgtattgggacagttactccattagaggcgtacaaacaatactgggatagggtaatgcaagtcccccccgatggtcgccccgcaaacgcgcggggaggtggggtcgcttttttttttctctctcgagggggccgcgagagggctggcctcctctcccggggtccgccgggcgcccagaaaccgggggggggttattttcgggggggggtccgaccagcccgcccgtcgcccgcccgcacagacagacagacacttttttcataaaaaccgttccgcttttattaacaacaaacagtccgcgcgccagtggcgctcacgagaaaaggaggggactccgtcacccccgactctgcggggggctcctccccccgcgccctccccacacatcgtcctcgtcctcggaggacgaggacgaggacaacagctccaccttgaccgccgggcgcaaacccacccggcggtctcgcagcacacccggggccaccgacacgatgctcaccccaaaggatgaccccggtgcgtccccgtcgtccccgcccccctcctcgctgtcccacgcgtcttcacaccccacctcccaatcgtccagctccaaagcgtgttctctgtcgtctgcggtgcgccgctgtcgccccgcctgggtttctgacggccgttccgagcccccgtggtgtccgaacacgaaccgtgttccgtcgctcccctccaacaccgtctccgcggccccaaaaccgggcggccacattactctgggaatcggggggagggcattccgagcctcgtccgccgacgcatacagcgccaccgaccgaccggccacgggtggaagcacgagtggttctgcggcagggtcgggttccagcagggcgtggcggcaaaacaccctcgcccaggtgggtacgtcgccggcctccggcccggcggcccccggtctccgtccctcgggaaggaagacgggtcgaagcgcggcacccaggccccatcggtttgctgcgcggtggctatgtgccgcctcgtccacaaagtcggctgccccgagccccagaccccgagactgtcgcgcgaggtccttgcaaccgtcaaaacccggcagcacgtactgccggtattcacggggcgacagggggacgcgggtcttggggcccgcgcgggtacacacggtgtatgcgacgttcccaccgcggcacaaacacaggggttgttcgcccgggtacaggttggcaaacgcagtctcgatacgagcaaaactcgctggcccaaaggtgcgcgacgatgcaaacacggcccgggcgagtccttctgtgaccgccgagtctggccatcggacgacggcctgggcgtccggtcgcgccggggcccggacgtacacgtgatactgagacaaagcgggtccatccctgggccacctctcgagggccaccgcgtccaacaccagcaaccggcgccgggcagaggccaaccgcgagcctagatactcgacggccccggcaaaggccaggtctcgggtcgacagtaataaaacgccccgggcgttcaaagcggacacgtccggcgggccggtccagttcccggcccaggcatgagtgctcggcaggcacaaccggttactcagggctgccaggaccacagacagtccccctcgggatggactccatgacggtcccggatctgtcgcgagggtgctctcgagggggccgttgatgtcctctccgggcaacggatcgtagatgatcagaagcctcacatcctccgggtctgggatctgccgcatccaggcgcacctccgtcgcagcgcctccactccgctgggtggaccaaaccgtcggtctcctccgcccggacgccgagcggcgatttccgccaaggcgccgggatcaaagcttagcgcagggcgccaggccgtgggaaacaatgggtcgtcgaccagacgggcgatggtttcgggggtacagtacgccttgcgagcctggtccgacgggaccggggtatgcagggccccccggggaatacgccgaaatcccccgtttggggccggtccgtcaagtggcatcgttattacggcggggggatccaccacagggcccgaggtgatggtcacgggctcggatacccgcctcttggccttggaaaccacatgatcgtctgcaacccgggcgtccgcgacgggtgtctccctaatcttgtcgaggaggcttctgctctcgactggctgggacttgcgcttgcgcggagttcgtaaacgatcatccggtggacacacagaaagagagcgtgcggcggccgacggctgagggtcgggagcctgtgtggccggggttgttggagaagggtgaccgcgggagatccgcgccgccggactggagcccgttgcctcggggtatgccatgctggcaaaggctctgcggagactctgtaggataaagtgtttttgggcccggtcgtatcgacggctcatagccacggccgcggccgcgtgggggagagcccagagggcctcccccgtggccatggcttcgcctacatgcggaacgggagacgctacgctccccgtaacggcggtacccgcccgtcccggtggcaacagcttttggtagaactggttcagggccgagttgacaccggtcagcttggggttctggagccatgctatagggtctctgtctggacagtagatcaggttaatcagcgcgcggtactgtctagccggatctcccaactccggcacgtaaagcggcacgggttccgttgaggcctcgtaacgagcccgcgccgctctcacagcctcatcctcccagtgaccctctctggtctccccggacggtccaaaccgcaccctgttggatgggaggggtgccgatccgggccaagggcttccgtcgggcatcatgagcggccccgacaccgggggaattatcggggttctggatcgcggcagggaaaatgatttctgtctctggcgccccggttcccccgcaagacgtttggtcttacgaatcctcggatcgggaccgctgatggatcgatatcccggttggatattttgtttcgtcgacccaccatcatttgagtccgaatcatccgaatttgacggggaaggggcgtgttcgcgtccggacctgctgcctgtagtttcacttcccaccgaaacgcgccggggttcatcgtcttcatcctccgatgacgatccccacgacgaggaagaggatgaagacgaaacaaactcacgactctttggctttttctccactgggctgtcatcctcaatcgggtctggtgcgtgggatcttcccggcagggccaaaaacgctctaggtttgccccccgacgaacgtccagggacgcgaggtgttataccccgggcatcatgtttccttgggcgggtatcatcggtctcaaacggcaggtccgcctttgcccccttagcgggaacgctgtccgaaaggacgtggtacaattgctcaaccgggccgggtacaggtccaccgggtttccgcgccgggagtgggaccttaaccttcaaagtctttttcttcgggctctttccctgagcgggccgttgagttttctggagaactactccgtcccccgatgcatgcgcatgacccgcttgctcatcgcccggctttttacccgagatggactgagtttgtctgtctcgatggaccaccgacggcaaacctggtgaatttcctctcgtcgtttgtcggggtatagaccgctggtcttcccgttgatcgttcccggcggcgtctccaacaggagacgcgggggatacaggggagaaggcctgcgggaacggaggggtcgtacctctgcccgtttccccatcgttcatcggtggttttggagacctagcaagcttcgttccgagagagactgtctcaagggagcgatcggctcctgttggttctcgcgcgccggcctccgagaatcgggtgtggaagacctcggccagcgggattacaggcgagcccattagatcctgaccgtcctcgcatacgtagtcgtcttgtgttagctcttcgccaacatcttccgttctgggttctggttgaagtcccgatacggagggaattgaaacgatctcgtgttcccgtcccaccatgaccccgttctctccaaatagtagatcgtcaggctgactcgaggtgaccacccgggccctgtgttcggcggccgccgcggccgcgtccaacaggtccattaactccaaagtatcaggcgaccccgcgcgttggggtgtagagcgctgcatcggcggcgtatccatcgcactggggtgaatttagacgtacccgagttttccaaacgctctcgcagccttcaaaggattgcgattgcggttggtgagggagttccaacagtacttaaaacgtgttgtgcccccccctcgaccgcatatttcctccccgtgtcgtcaccgtgtaaatattcttaatgataagacgatgtagtgattggacgagactcgaggcgggaagttcatggaccatagtatgcgtttaaggagagaccgctggttggcgatgtacgcccggtgtctatttccgcataccttacaacatcataacaagggataccagacatgtgaatttcatttacatatgtttaaataacaaccaatcatcgtgtgtctacagacgatatataatatacataaacacaattggggttgtctcacatgcaaaacatcttatataacacgggttgtttccacccatccggcatctagttaatcaaatgcacgtcgacggtgtgtttgggtccctctccgtcgtcattacgttcgcgcaatcaacaagcgtatacaccaccacccctcccaacgattatgtcaggcggcacgaagcccgcgataacccataaaatacacacggggttgtggtgttcacgtaaccccccgccgatggggagggggcgcggtaccccgccgatggggagggggcgcggtaccccgccgatggggagggggcgcggtaccccgccgatggggagggggcgcggtaccccgccgatggggagggggcgcggtaccccgccgatgtttataaccataattctctaaaccgttgtagaaaatcacaaaaaaatttattcaaaaacaagtcgaagaacttcatatctgaggcatgtaaacccgttcgcacttcctggggtggaatggggtggggtgggggggtgaaaaagggggggggttaaattgggcgtccgcatgtctgtggtgtacgccaatcggatacactcttttgatctgcattcgcacttcccgttttttcactgtatgggttttcatgttttggcatgtgtccaaccaccgttcgcactttctttctatatatatatatatatatatatatatatatagagaaagagagagagtttcttgttcgcgcgtgttcccgcgatgtcgcggttttatggggtgtgggcgggcttttcacagaatatatatattccaaatggagcggcaggctttttaaaatcgatttgacgtgataaaaaaaaacacacggggcccccccctttttttggtgttataaaggcaacccaatcgaaggtctcccgccccggaatcccccattgccattttacccaagtagccttattcatagatgtaaacgtttgggtgtgtgttttgttgtgcagggttcgtccgattcataacgcgacagcgtcgagtcggttttaagggaaaaggttactacggccccaaggacatgttttgcacctcaccggctacgcggggcgactcgtccgagtcaaaacccggggcatcggttgatgttaacggaaagatggaatatggatctgcaccaggacccctgaacggccgggatacgtcgcggggccccggcgcgttttgtactccgggttgggagatccacccggccaggctcgttgaggacatcaaccgtgtttttttatgtattgcacagtcgtcgggacgcgtcacgcgagattcacgaagattgcggcgcatatgcctcgacttttatctaatgggtcgcaccagacagcgtcccacgttagcgtgctgggaggaattgttacagcttcaacccacccagacgcagtgcttacgcgctactttaatggaagtgtcccatcgaccccctcggggggaagacgggttcattgaggcgccgaatgttcctttgcataggagcgcactggaatgtgacgtatctgatgatggtggtgaagacgatagcgacgatgatgggtctacgccatcggatgtaattgaatttcgggattccgacgcggaatcatcggacggggaagactttatagtggaagaagaatcagaggagagcaccgattcttgtgaaccagacggggtacccggcgattgttatcgagacggggatgggtgcaacaccccgtccccaaagagaccccagcgtgccatcgagcgatacgcgggtgcagaaaccgcggaatatacagccgcgaaagcgctcaccgcgttgggcgaggggggtgtagattggaagcgacgtcgacacgaagccccgcgccggcatgatataccgcccccccatggcgtgtagtctttataaataaatacaatggtttggctcgtgtctttttttgatgtctgtctgtgggggagtggggtgttgtggatattagagggtagagggtgctggtttgaacgtctccattaacccacggggtccccacacgggccgtgtggtatgaatctctgcggatcccgcggtgagcacccgggcggtgaatatgccggactttactgcacacgacacgatacccccgcgcaccaggctctcatgaacgacgccgaacggtacttcgccgccgcgctatgcgccatatctaccgaggcctacgaggcttttatacacagcccctccgagagaccgtgcgcgagtttgtgggggagggcaaaggacgccttcggacggatgtgcggggagctcgcagcggatagacaacgtccaccctcggttccgccgatccgcagagcggtgttatcgttattacgcgagcaatgcatgccggatccacaatcgcatctggagctcagcgagcggctgatattgatggcatattggtgctgtttgggacacgccggacttccgactattggattgtcgcccgataataaatgcatccgcgccgaattatatgaccgccccgggggaatttgtcacaggctttttgacgcgtacctgggctgcgggtcccttggagtcccaagaacctacgagagatcctgacaccccatccctttatatagaaaaaaaaaataaatttaaaacatacaccggataaaagcgtactgttttttatttaaatttacacgctcggcgttgccccggttcggtgatcaccgggtcttatctatatacaccgtgtaactcgaacccccgtgactccctccaatcgcgttaccaaactcttcttccgtatccgtagattccgagtcctcgaaatcgtccacttatccaacaaattgtgacgttatatatcccaaggcaaaggccgctcccgtcatagcaaatacaaagacaattattagcgtaatataacagaattttttacgatgatatattttatgttgatattttccaattcgacgcaaaaattcatctgccgtttcattttcgctatcactataataacacttttcagccgaacggctcggttgtatggctgttatcgttgtattatttggttgcgctcgcggggttaccaccgcttccatcagtaaggccacggcctcaccctccatggtgttttgtccggccatagaaatccagattgtaaggccagcaggctagtttaaaagtgtttaataccacaccttttgatatttatatacatgcaagattctagattattcatcaataggtcgtttaaagcgcgttttcataaacgttgtcagctataccgacattctcacaaagaggtaaagttaccttacgttattattaaataaaacatgtagacattattaataatcctaggaacaatcaaatccatatttgtaagttatgtttaacccctcccctttttgtcattatctccgccctcttataatcggatcactttataagtgtgtcggtgagtatattttgtacagttgttggacaacaggtttttggttcattaacactatcaacataagtcggggtatacaagtataatgaacgacgttgatgcaacagacacctttgttggacaaggaaagttccgtggcgccatctcaacatcaccgtcacatattatgcaaacatgtgggtttatacaacagatgtttccagttgaaatgtcgcccggcatagaatctgaggatgatcccaattatgacgttaacatggatatacagtcttttaatatatttgatggtgtacacgaaactgaagccgaagcctctgtggcattgtgcgcagaagcacgcgttggaattaataaagcgggatttgtaatattaaaaacgtttacaccaggggcggaaggttttgcgtttgcgtgtatggacagtaaaacatgtgaacatgtggtcattaaagcgggtcaacgtcaaggaacggccaccgaggcaaccgtgttaagagcgttaacccacccatccgttgtacagcttaaaggaacgtttacgtataacaaaatgacatgtcttatattaccacgttaccgaacagatttatactgctatctagctgcaaagcgcaacctccccatatgtgacattttagcaattcagcgatctgtattacgcgcgttacagtatcttcataataacagtattattcaccgtgatataaaatctgaaaatatatttattaaccacccaggtgatgtttgtgtgggagactttggagcagcgtgtttccccgtggatattaatgccaacaggtattatggctgggctggaacaatcgccacaaactctcctgagttattggctagagatccatatggacctgccgtggacatatggagtgccgggattgtattatttgaaatggctacaggacagaactcgttatttgaacgagacggtttagatggcaattgtgacagtgagcgtcaaattaaacttattatacgacgatctggaactcatcccaatgaatttcccattaaccctacatcaaatcttcgtcgacaatacattggtttggcaaaacggtcttctcgaaaacccggatccaggccattgtggacaaatctatatgagttgccaattgatttggagtatttgatatgtaagatgttatcgtttgacgcacgtcatcgaccatcagcagaggtgttgcttaaccactctgttttccaaactcttcccgatccatatccaaatccaatggaagttggagattaaaattcattaagcctgttaataaaatattgtataaattgtgtttataacgtataacccgttaaggcaaatagggtacaaacgcgcaatgttttgaaatactaatataaataacataaccaatagaaacttaatacagagtcacgccccattacaacaaggataaaacacgggatcattttcttaacattgtagtagcgctgaaaagcgtcccctcccccggctcacagagctgctcttcggtgtagttgggtatactggtgcgcctcatttaatcgcgatgtttttaatccaatgtttgatatcggccgttatattttacatacaagtgaccaacgctttgatcttcaagggcgaccacgtgagcttgcaagttaacagcagtctcacgtctatccttattcccatgcaaaatgataattatacagagataaaaggacagcttgtctttattggagagcaactacctaccgggacaaactatagcggaacactggaactgttatacgcggatacggtggcgttttgtttccggtcagtacaagtaataagatacgacggatgtccccggattagaacgagcgcttttatttcgtgtaggtacaaacattcgtggcattatggtaactcaacggatcggatatcaacagagccggatgctggtgtaatgttgaaaattaccaaaccgggaataaatgatgctggtgtgtatgtacttcttgttcggttagaccatagcagatccaccgatggtttcattcttggtgtaaatgtatatacagcgggctcgcatcacaacattcacggggttatctacacttctccgtctctacagaatggatattctacaagagccctttttcaacaagctcgtttgtgtgatttacccgcgacacccaaagggtccggtacctccctgtttcaacatatgcttgatcttcgtgccggtaaatcgttagaggataacccttggttacatgaggacgttgttacgacagaaactaagtccgttgttaaggaggggatagaaaatcacgtatatccaacggatatgtccacgttacccgaaaagtcccttaatgatcctccagaaaatctacttataattattcctatagtagcgtctgtcatgatcctcaccgccatggttattgttattgtaataagcgttaagcgacgtagaattaaaaaacatccaatttatcgcccaaatacaaaaacaagaaggggcatacaaaatgcgacaccagaatccgatgtgatgttggaggccgccattgcacaactagcaacgattcgcgaagaatcccccccacattccgttgtaaacccgtttgttaaatagaactaattatcccggattttatattaaataaactatatgcgttttatttagcgttttgattacgcgttgtgatatgaggggaaggattaagaatctcctaactataagttaacacgcccacatttgggcggggatgttttatgaagccttaaaggccgagctggtatacacgagagcagtccatggttttagacctcgggcgaattgcgtggttttaagtgactatattccgagggtcgcctgtaatatggggacagttaataaacctgtggtgggggtattgatggggttcggaattatcacgggaacgttgcgtataacgaatccggtcagagcatccgtcttgcgatacgatgattttcacaccgatgaagacaaactggatacaaactccgtatatgagccttactaccattcagatcatgcggagtcttcatgggtaaatcggggagagtcttcgcgaaaagcgtacgatcataactcaccttatatatggccacgtaatgattatgatggatttttagagaacgcacacgaacaccatggggtgtataatcagggccgtggtatcgatagcggggaacggttaatgcaacccacacaaatgtctgcacaggaggatcttggggacgatacgggcatccacgttatccctacgttaaacggcgatgacagacataaaattgtaaatgtggaccaacgtcaatacggtgacgtgtttaaaggagatcttaatccaaaaccccaaggccaaagactcattgaggtgtcagtggaagaaaatcacccgtttactttacgcgcaccgattcagcggatttatggagtccggtacaccgagacttggagctttttgccgtcattaacctgtacgggagacgcagcgcccgccatccagcatatatgtttaaaacatacaacatgctttcaagacgtggtggtggatgtggattgcgcggaaaatactaaagaggatcagttggccgaaatcagttaccgttttcaaggtaagaaggaagcggaccaaccgtggattgttgtaaacacgagcacactgtttgatgaactcgaattagacccccccgagattgaaccgggtgtcttgaaagtacttcggacagaaaaacaatacttgggtgtgtacatttggaacatgcgcggctccgatggtacgtctacctacgccacgtttttggtcacctggaaaggggatgaaaaaacaagaaaccctacgcccgcagtaactcctcaaccaagaggggctgagtttcatatgtggaattaccactcgcatgtattttcagttggtgatacgtttagcttggcaatgcatcttcagtataagatacatgaagcgccatttgatttgctgttagagtggttgtatgtccccatcgatcctacatgtcaaccaatgcggttatattctacgtgtttgtatcatcccaacgcaccccaatgcctctctcatatgaattccggttgtacatttacctcgccacatttagcccagcgtgttgcaagcacagtgtatcaaaattgtgaacatgcagataactacaccgcatattgtctgggaatatctcatatggagcctagctttggtctaatcttacacgacgggggcaccacgttaaagtttgtagatacacccgagagtttgtcgggattatacgtttttgtggtgtattttaacgggcatgttgaagccgtagcatacactgttgtatccacagtagatcattttgtaaacgcaattgaagagcgtggatttccgccaacggccggtcagccaccggcgactactaaacccaaggaaattacccccgtaaaccccggaacgtcaccacttctacgatatgccgcatggaccggagggcttgcagcagtagtacttttatgtctcgtaatatttttaatctgtacggctaaacgaatgagggttaaagcctatagggtagacaagtccccgtataaccaaagcatgtattacgctggccttccagtggacgatttcgaggactcggaatctacggatacggaagaagagtttggtaacgcgattggagggagtcacgggggttcgagttacacggtgtatatagataagacccggtgatcaccgaaccggggcaacgccgagcgtgtaaatttaaataaaaaacagtacgcttttatccggtgtatgttttaaatttattttttttttctatataaagggatggggtgtcaggatctctcgtaggttcttgggactccaagggacccgcagcccaggtacgcgtcaaaaagcctgtgacaaattcccccggggcggtcatataattcggcgcggatgcatttattatcgggcgacaatccaatagtcggaagtccggcgtgtcccaaacagcaccaatatgccatcaatatcagccgctcgctgagctccagatgcgattgtggatccggcatgcattgctcgcgtaataacgataacaccgctctgcggatcggcggaaccgagggtggacgttgtctatccgctgcgagctccccgcacatccgtccgaaggcgtcctttgccctcccccacaaactcgcgcacggtctctcggaggggctgtgtataaaagcctcgtaggcctcggtagatatggcgcatagcgcggcggcgaagtaccgttcggcgtcgttcatgagagcctggtgcgcgggggtatcgtgtcgtgtgcagtaaagtccggcatattcaccgcccgggtgctcaccgcgggatccgcagagattcataccacacggcccgtgtggggaccccgtgggttaatggagacgttcaaaccagcaccctctaccctctaatatccacaacaccccactcccccacagacagacatcaaaaaaagacacgagccaaaccattgtatttatttataaagactacacgccatgggggggcggtatatcatgccggcgcggggcttcgtgtcgacgtcgcttccaatctacacccccctcgcccaacgcggtgagcgctttcgcggctgtatattccgcggtttctgcacccgcgtatcgctcgatggcacgctggggtctctttggggacggggtgttgcacccatccccgtctcgataacaatcgccgggtaccccgtctggttcacaagaatcggtgctctcctctgattcttcttccactataaagtcttccccgtccgatgattccgcgtcggaatcccgaaattcaattacatccgatggcgtagacccatcatcgtcgctatcgtcttcaccaccatcatcagatacgtcacattccagtgcgctcctatgcaaaggaacattcggcgcctcaatgaacccgtcttccccccgagggggtcgatgggacacttccattaaagtagcgcgtaagcactgcgtctgggtgggttgaagctgtaacaattcctcccagcacgctaacgtgggacgctgtctggtgcgacccattagataaaagtcgaggcatatgcgccgcaatcttcgtgaatctcgcgtgacgcgtcccgacgactgtgcaatacataaaaaaacacggttgatgtcctcaacgagcctggccgggtggatctcccaacccggagtacaaaacgcgccggggccccgcgacgtatcccggccgttcaggggtcctggtgcagatccatattccatctttccgttaacatcaaccgatgccccgggttttgactcggacgagtcgccccgcgtagccggtgaggtgcaaaacatgtccttggggccgtagtaaccttttcccttaaaaccgactcgacgctgtcgcgttatgaatcggacgaaccctgcacaacaaaacacacacccaaacgtttacatctatgaataaggctacttgggtaaaatggcaatgggggattccggggcgggagaccttcgattgggttgcctttataacaccaaaaaaaggggggggccccgtgtgtttttttttatcacgtcaaatcgattttaaaaagcctgccgctccatttggaatatatatattctgtgaaaagcccgcccacaccccataaaaccgcgacatcgcgggaacacgcgcgaacaagaaactctctctctttctctatatatatatatatatatatatatatatatagaaagaaagtgcgaacggtggttggacacatgccaaaacatgaaaacccatacagtgaaaaaacgggaagtgcgaatgcagatcaaaagagtgtatccgattggcgtacaccacagacatgcggacgcccaatttaaccccccccctttttcacccccccaccccaccccattccaccccaggaagtgcgaacgggtttacatgcctcagatatgaagttcttcgacttgtttttgaataaatttttttgtgattttctacaacggtttagagaattatggttataaacatcggcggggtaccgcgccccctccccatcggcggggtaccgcgccccctccccatcggcggggtaccgcgccccctccccatcggcggggtaccgcgccccctccccatcggcggggtaccgcgccccctccccatcggcggggggttacgtgaacaccacaaccccgtgtgtattttatgggttatcgcgggcttcgtgccgcctgacataatcgttgggaggggtggtggtgtatacgcttgttgattgcgcgaacgtaatgacgacggagagggacccaaacacaccgtcgacgtgcatttgattaactagatgccggatgggtggaaacaacccgtgttatataagatgttttgcatgtgagacaaccccaattgtgtttatgtatattatatatcgtctgtagacacacgatgattggttgttatttaaacatatgtaaatgaaattcacatgtctggtatcccttgttatgatgttgtaaggtatgcggaaatagacaccgggcgtacatcgccaaccagcggtctctccttaaacgcatactatggtccatgaacttcccgcctcgagtctcgtccaatcactacatcgtcttatcattaagaatatttacacggtgacgacacggggaggaaatatgcggtcgaggggggggcacaacacgttttaagtactgttggaactccctcaccaaccgcaatcgcaatcctttgaaggctgcgagagcgtttggaaaactcgggtacgtctaaattcaccccagtgcgatggatacgccgccgatgcagcgctctacaccccaacgcgcggggtcgcctgatactttggagttaatggacctgttggacgcggccgcggcggccgccgaacacagggcccgggtggtcacctcgagtcagcctgacgatctactatttggagagaacggggtcatggtgggacgggaacacgagatcgtttcaattccctccgtatcgggacttcaaccagaacccagaacggaagatgttggcgaagagctaacacaagacgactacgtatgcgaggacggtcaggatctaatgggctcgcctgtaatcccgctggccgaggtcttccacacccgattctcggaggccggcgcgcgagaaccaacaggagccgatcgctcccttgagacagtctctctcggaacgaagcttgctaggtctccaaaaccaccgatgaacgatggggaaacgggcagaggtacgacccctccgttcccgcaggccttctcccctgtatcccccgcgtctcctgttggagacgccgccgggaacgatcaacgggaagaccagcggtctataccccgacaaacgacgagaggaaattcaccaggtttgccgtcggtggtccatcgagacagacaaactcagtccatctcgggtaaaaagccgggcgatgagcaagcgggtcatgcgcatgcatcgggggacggagtagttctccagaaaactcaacggcccgctcagggaaagagcccgaagaaaaagactttgaaggttaaggtcccactcccggcgcggaaacccggtggacctgtacccggcccggttgagcaattgtaccacgtcctttcggacagcgttcccgctaagggggcaaaggcggacctgccgtttgagaccgatgatacccgcccaaggaaacatgatgcccggggtataacacctcgcgtccctggacgttcgtcggggggcaaacctagagcgtttttggccctgccgggaagatcccacgcaccagacccgattgaggatgacagcccagtggagaaaaagccaaagagtcgtgagtttgtttcgtcttcatcctcttcctcgtcgtggggatcgtcatcggaggatgaagacgatgaaccccggcgcgtttcggtgggaagtgaaactacaggcagcaggtccggacgcgaacacgccccttccccgtcaaattcggatgattcggactcaaatgatggtgggtcgacgaaacaaaatatccaaccgggatatcgatccatcagcggtcccgatccgaggattcgtaagaccaaacgtcttgcgggggaaccggggcgccagagacagaaatcattttccctgccgcgatccagaaccccgataattcccccggtgtcggggccgctcatgatgcccgacggaagcccttggcccggatcggcacccctcccatccaacagggtgcggtttggaccgtccggggagaccagagagggtcactgggaggatgaggctgtgagagcggcgcgggctcgttacgaggcctcaacggaacccgtgccgctttacgtgccggagttgggagatccggctagacagtaccgcgcgctgattaacctgatctactgtccagacagagaccctatagcatggctccagaaccccaagctgaccggtgtcaactcggccctgaaccagttctaccaaaagctgttgccaccgggacgggcgggtaccgccgttacggggagcgtagcgtctcccgttccgcatgtaggcgaagccatggccacgggggaggccctctgggctctcccccacgcggccgcggccgtggctatgagccgtcgatacgaccgggcccaaaaacactttatcctacagagtctccgcagagcctttgccagcatggcataccccgaggcaacgggctccagtccggcggcgcggatctcccgcggtcacccttctccaacaaccccggccacacaggctcccgaccctcagccgtcggccgccgcacgctctctttctgtgtgtccaccggatgatcgtttacgaactccgcgcaagcgcaagtcccagccagtcgagagcagaagcctcctcgacaagattagggagacacccgtcgcggacgcccgggttgcagacgatcatgtggtttccaaggccaagaggcgggtatccgagcccgtgaccatcacctcgggccctgtggtggatccccccgccgtaataacgatgccacttgacggaccggccccaaacgggggatttcggcgtattccccggggggccctgcataccccggtcccgtcggaccaggctcgcaaggcgtactgtacccccgaaaccatcgcccgtctggtcgacgacccattgtttcccacggcctggcgccctgcgctaagctttgatcccggcgccttggcggaaatcgccgctcggcgtccgggcggaggagaccgacggtttggtccacccagcggagtggaggcgctgcgacggaggtgcgcctggatgcggcagatcccagacccggaggatgtgaggcttctgatcatctacgatccgttgcccggagaggacatcaacggccccctcgagagcaccctcgcgacagatccgggaccgtcatggagtccatcccgagggggactgtctgtggtcctggcagccctgagtaaccggttgtgcctgccgagcactcatgcctgggccgggaactggaccggcccgccggacgtgtccgctttgaacgcccggggcgttttattactgtcgacccgagacctggcctttgccggggccgtcgagtatctaggctcgcggttggcctctgcccggcgccggttgctggtgttggacgcggtggccctcgagaggtggcccagggatggacccgctttgtctcagtatcacgtgtacgtccgggccccggcgcgaccggacgcccaggccgtcgtccgatggccagactcggcggtcacagaaggactcgcccgggccgtgtttgcatcgtcgcgcacctttgggccagcgagttttgctcgtatcgagactgcgtttgccaacctgtacccgggcgaacaacccctgtgtttgtgccgcggtgggaacgtcgcatacaccgtgtgtacccgcgcgggccccaagacccgcgtccccctgtcgccccgtgaataccggcagtacgtgctgccgggttttgacggttgcaaggacctcgcgcgacagtctcggggtctggggctcggggcagccgactttgtggacgaggcggcacatagccaccgcgcagcaaaccgatggggcctgggtgccgcgcttcgacccgtcttccttcccgagggacggagaccgggggccgccgggccggaggccggcgacgtacccacctgggcgagggtgttttgccgccacgccctgctggaacccgaccctgccgcagaaccactcgtgcttccacccgtggccggtcggtcggtggcgctgtatgcgtcggcggacgaggctcggaatgccctccccccgattcccagagtaatgtggccgcccggttttggggccgcggagacggtgttggaggggagcgacggaacacggttcgtgttcggacaccacgggggctcggaacggccgtcagaaacccaggcggggcgacagcggcgcaccgcagacgacagagaacacgctttggagctggacgattgggaggtggggtgtgaagacgcgtgggacagcgaggaggggggcggggacgacggggacgcaccggggtcatcctttggggtgagcatcgtgtcggtggccccgggtgtgctgcgagaccgccgggtgggtttgcgcccggcggtcaaggtggagctgttgtcctcgtcctcgtcctccgaggacgaggacgatgtgtggggagggcgcggggggaggagccccccgcagagtcgggggtgacggagtcccctccttttctcgtgagcgccactggcgcgcggactgtttgttgttaataaaagcggaacggtttttatgaaaaaagtgtctgtctgtctgtgcgggcgggcgacgggcgggctggtcggacccccccccgaaaataacccccccccggtttctgggcgcccggcggaccccgggagagg

SEQ ID NO: 9 - protein, 238 aa, Varicella zoster
MHVISETLAYGHVPAFIMGSTLVRPSLNATAEENPASETRCLLRVLAGRTVDLPGGGTLHITCTKTYVIIGKYSKPGERLSLARLIGRAMTPGGARTFIILAMKEKRSTTLGYECGTGLHLLAPSMGTFLRTHGLSNRDLCLWRGNIYDMHMQRLMFWENIAQNTTETPCITSTLTCNLTEDSGEAALTTSDRPTLPTLTAQGRPTVSNIRGILKGSPRQQPVCHRVRFAEPTEGVLM

SEQ ID NO: 10 - protein, 259 aa, Varicella zoster
MQTVCASLCGYARIPTEEPSYEEVRVNTHPQGAALLRLQEALTAVNGLLPAPLTLEDVVASADNTRRLVRAQALARTYAACSRNIECLKQHHFTEDNPGLNAVVRSHMENSKRLADMCLAAITHLYLSVGAVDVTTDDIVDQTLRMTAESEVVMSDVVLLEKTLGVVAKPQASFDVSHNHELSIAKGENVGLKTSPIKSEATQLSEIKPPLIEVSDNNTSNLTKKTYPTETLQPVLTPKQTQDVQRTTPAIKKSHVMLV

SEQ ID NO: 11 - protein, 87 aa, Varicella zoster
MGSITASFILITMQILFFCEDSSGEPNFAERNFWHASCSARGVYIDGSMITTLFFYASLLGVCVALISLAYHACFRLFTRSVLRSTW

SEQ ID NO: 12 - protein, 302 aa, Varicella zoster
MASSDGDRLCRSNAVRRKTTPSYSGQYRTARRSVVVGPPDDSDDSLGYITTVGADSPSPVYADLYFEHKNTTPRVHQPNDSSGSEDDFEDIDEVVAAFREARLRHELVEDAVYENPLSVEKPSRSFTKNAAVKPKLEDSPKRAPPGAGAIASGRPISFSTAPKTATSSWCGPTPSYNKRVFCEAVRRVAAMQAQKAAEAAWNSNPPRNNAELDRLLTGAVIRITVHEGLNLIQAANEADLGEGASVSKRGHNRKTGDLQGGMGNEPMYAQVRKPKSRTDTQTTGRITNRSRARSASRTDTRK

SEQ ID NO: 13 - protein, 410 aa, Varicella zoster
MECNLGTEHPSTDTWNRSKTEQAVVDAFDESLFGDVASDIGFETSLYSHAVKTAPSPPWVASPKILYQQLIRDLDFSEGPRLLSCLETWNEDLFSCFPINEDLYSDMMVLSPDPDDVISTVSTKDHVEMFNLTTRGSVRLPSPPKQPTGLPAYVQEVQDSFTVELRAREEAYTKLLVTYCKSIIRYLQGTAKRTTIGLNIQNPDQKAYTQLRQSILLRYYREVASLARLLYLHLYLTVTREFSWRLYASQSAHPDVFAALKFTWTERRQFTCAFHPVLCNHGIVLLEGKPLTASALREINYRRRELGLPLVRCGLVEENKSPLVQQPSFSVHLPRSVGFLTHHIKRKLDAYAVKHPQEPRHVRADHPYAKVVENRNYGSSIEAMILAPPSPSEILPGDPPRPPTCGFLTR

SEQ ID NO: 14 - protein, 819 aa, Varicella zoster
MQSGHYNRRQSRRQRISSNTTDSPRHTHGTRYRSTNWYTHPPQILSNSETLVAVQELLNSEMDQDSSSDASDDFPGYALHHSTYNGSEQNTSTSRHENRIFKLTEREANEEININTDAIDDEGEAEEGEAEEDAIDDEGEAEEGEAEEDAIDDEGEAEEGEAEEDAIDDEGEAEEGEAEEGEAEEGEAEEDAIDDEGEAEEDAAEEDAIDDEGEAEEDYFSVSQVCSRDADEVYFTLDPEISYSTDLRIAKVMEPAVSKELNVSKRCVEPVTLTGSMLAHNGFDESWFAMRECTRREYITVQGLYDPIHLRYQFDTSRMTPPQILRTIPALPNMTLGELLLIFPIEFMAQPISIERILVEDVFLDRRASSKTHKYGPRWNSVYALPYNAGKMYVQHIPGFYDVSLRAVGQGTAIWHHMILSTAACAISNRISHGDGLGFLLDAAIRISANCIFLGRNDNFGVGDPCWLEDHLAGLPREAVPDVLQVTQLVLPNRGPTVAIMRGFFGALAYWPELRIAISEPSTSLVRYATGHMELAEWFLFSRTHSLKPQFTPTEREMLASFFTLYVTLGGGMLNWICRATAMYLAAPYHSRSAYIAVCESLPYYYIPVNSDLLCDLEVLLLGEVDLPTVCESYATIAHELTGYEAVRTAATNFMIEFADCYKESETDLMVSAYLGAVLLLQRVLGHANLLLLLLSGAALYGGCSIYIPRGILDAYNTLMLAASPLYAHQTLTSFWKDRDDAMQTLGIRPTTDVLPKEQDRIVQASPIEMNFRFVGLETIYPREQPIPSVDLAENLMQYRNEILGLDWKSVAMHLLRKY

SEQ ID NO: 15 - protein, 661 aa, Varicella zoster
MFSRFARSFSSDDRTRKSYDGSYQSFNAGERDLPTPTRDWCSISQRITSERVRDGCLIPTPGEALETAVKALSEKTDSLTSPVLQSTERHSVLLGLHHNNVPESLVVSCMSNDVHDGFMQRYMETIQRCLDDLKLSGDGLWWVYENTYWQYLKYTTGAEVPVTSEKVNKKSKSTVLLFSSVVANKPISRHPFKSKVINSDYRGICQELREALGAVQKYMYFMRPDDPTNPSPDTRIRVQEIAAYTATGYGWMLWFLDVVDARVCRHLKLQFRRIRGPRASVIPDDLLRRHLKTGPAVSAGTGVAFILAATTASALTALLRISVLWRKEEWRDGLNGTAAAIVAAVELITLLHHHFQYLINMMLIGYACWGDGGLNDPYILKALRAQGRFLYFAGQLVRTMSTHSWVVLETSTHMWFSRAVAQSILAHGGKPTKYYAQVLAASKRYTPLHLRRISEPSSVSDQPYIRFNRLGSPIGTGIGNLECVCLTGNYLSDDVNASSHVINTEAPLNSIAPDTNRQRTSRVLVRPDTGLDVTVRKNHCLDIGHTDGSPVDPTYPDHYTRIKAEYEGPVRDESNTMFDQRSDLRHIETQASLNDHVYENIPPKEVGFNSSSDLDVDSLNGYTSGDMHTDDDLSPDFIPNDVPVRCKTTVTFRKNTPKSHH

SEQ ID NO: 16 - protein, 301 aa, Varicella zoster
MGDLSCWTKVPGFTLTGELQYLKQVDDILRYGVRKRDRTGIGTLSLFGMQARYNLRNEFPLLTTKRVFWRAVVEELLWFIRGSTDSKELAAKDIHIWDIYGSSKFLNRNGFHKRHTGDLGPIYGFQWRHFGAEYKDCQSNYLQQGIDQLQTVIDTIKTNPESRRMIISSWNPKDIPLMVLPPCHTLCQFYVANGELSCQVYQRSGDMGLGVPFNIAGYALLTYIVAHVTGLKTGDLIHTMGDAHIYLNHIDALKVQLARSPKPFPCLKIIRNVTDINDFKWDDFQLDGYNPHPPLKMEMAL

SEQ ID NO: 17 - protein, 455 aa, Varicella zoster
MGLFGLTRFIHEHKLVKPSIISTPPGVLTPVAVDVWNVMYTLLERLYPVGKRENLHGPSVTIHCLGVLLRLLTQRSYYPIFVLERCTDGPLSRGAKAIMSRAMNHDERGTSDLTRVLLSSNTSCSIKYNKTSETYDSVFRNSSTSCIPSEENKSQDMFLDGCPRQTDKTICLRDQNVCSLTSTMPSRGHPNHRLYHKLCASLIRWMGYAYVEAVDIEADEACANLFHTRTVALVYTTDTDLLFMGCDILLDAIPMFAPVVRCRDLLQYLGITYPEFLVAFVRCQTDLHTSDNLKSVQQVIQDTGLKVPHQMDTSTRSPTYDSWRHGEVFKSLTVATSGKTENGVSVSKYASNRSEVTVDASWALNLLPPSSSPLDNLERAFVEHIIAVVTPLTRGRLKLMKRVNIMQNTADPYMVINTLYHNLKGEKMARQYARIFKQFIPTPLPLNTVLTKYWN

SEQ ID NO: 18 - protein, 1038 aa, Varicella zoster
MEEPICYDTQKLLDDLSNLKVQEADNERPWSPEKTEIARVKVVKFLRSTQKIPAKHFIQIWEPLHSNICFVYSNTFLAEAAFTAENLPGLLFWRLDLDWTIEEPGNSLKILTQLSSVVQDSETLHRLSANKLRTSSKFGPVSIHFIITDWINMYEVALKDATTAIESPFTHARIGMLESAIAALTQHKFAIIYDMPFVQEGIRVLTQYAGWLLPFNVMWNQIQNSSLTPLTRALFIICMIDEYLTETPVHSISELFADTVNLIKDEAFVSIEEAVTNPRTVHESRISSALAYRDPYVFETSPGMLARRLRLDNGIWESNLLSLSTPGIHIEALLHLLNSDPEAETTSGSNVAEHTRGIWEKVQASTSPSMLISTLAESGFTRFSCKLLRRFIAHHTLAGFIHGSVVADEHITDFQQTLGCLALVGGLAYQLVETYAPTTEYVLTYTRTVNETEKRYETLLPALGLPPGGLGQIMRRCFAPRPLIESIQATRVILLNEISHAEARETTYFKQTHNQSSGALLPQAGQSAVREAVLTWFDLRMDSRWGITPPVDVGMTPPICVDPPATGLEAVMITEALKIAYPTEYNRSSVFVEPSFVPYIIATSTLDALSATIALSFDTRGIQQALSILQWARDYGSGTVPNADGYRTKLSALITILEPFTRTHPPVLLPSHVSTIDSLICELHRTVGIAVDLLPQHVRPLVPDRPSITNSVFLATLYYDELYGRWTRLDKTSQALVENFTSNALVVSRYMLMLQKFFACRFYPTPDLQAVGICNPKVERDEQFGVWRLNDLADAVGHIVGTIQGIRTQMRVGISSLRTIMADASSALRECENLMTKTSTSAIGPLFSTMASRYARFTQDQMDILMRVDKLTTGENIPGLANVEIFLNRWERIATACRHATAVPSAESIATVCNELRRGLKNIQEDRVNAPTSYMSHARNLEDHKAAVSFVMDSRQQFIVDSGPQMGAVLTSQCNIGTWENVNATFLHDNVKITTTVRDVISEAPTLIIGQRWLRPDEILSNVDLRLGVPGNTSGSDP

SEQ ID NO: 19 - protein, 2763 aa, Varicella zoster
MDIIPPIAVTVAGVGSRNQFDGALGPASGLSCLRTSLSFLHMTYAHGINATLSSDMIDGCLQEGAAWTTDLSNMGRGVPDMCALVDLPNRISYIKLGDTTSTCCVLSRIYGDSHFFTVPDEGFMCTQIPARAFFDDVWMGREESYTIITVDSTGMAIYRQGNISFIFDPHGHGTIGQAVVVRVNTTDVYSYIASEYTHRPDNVESQWAAALVFFVTANDGPVSEEALSSAVTLIYGSCDTYFTDEQYCEKLVTAQHPLLLSPPNSTTIVLNKSSIVPLHQNVGESVSLEATLHSTLTNTVALDPRCSYSEVDPWHAVLETTSTGSGVLDCRRRRRPSWTPPSSEENLACIDDGLVNNTHSTDNLHKPAKKVLKFKPTVDVPDKTQVAHVLPRLREVANTPDVVLNVSNVDTPESSPTFSRNMNVGSSLKDRKPFLFEQSGDVNMVVEKLLQHGHEISNGYVQNAVGTLDTVITGHTNVPIWVTRPLVMPDEKDPLELFINLTILRLTGFVVENGTRTHHGATSVVSDFIGPLGEILTGFPSAAELIRVTSLILTNMPGAEYAIKTVLRKKCTIGMLIIAKFGLVAMRVQDTTGALHAELDVLEADLGGSSPIDLYSRLSTGLISILNSPIISHPGLFAELIPTRTGSLSERIRLLCELVSARETRYMREHTALVSSVKALENALRSTRNKIDAIQIPEVPQEPPEETDIPPEELIRRVYEIRSEVTMLLTSAVTEYFTRGVLYSTRALIAEQSPRRFRVATASTAPIQRLLDSLPEFDAKLTAIISSLSIHPPPETIQNLPVVSLLKELIKEGEDLNTDTALVSWLSVVGEAQTAGYLSRREFDELSRTIKTINTRATQRASAEAELSCFNTLSAAVDQAVKDYETYNNGEVKYPEITRDDLLATIVRATDDLVRQIKILSDPMIQSGLQPSIKRRLETRLKEVQTYANEARTTQDTIKSRKQAAYNKLGGLLRPVTGFVGLRAAVDLLPELASELDVQGALVNLRTKVLEAPVEIRSQLTGDFWALFNQYRDILEHPGNARTSVLGGLGACFTAIIEIVPIPTEYRPSLLAFFGDVADVLASDIATVSTNPESESAINAVVATLSKATLVSSTVPALSFVLSLYKKYQALQQEITNTHKLTELQKQLGDDFSTLAVSSGHLKFISSSNVDDYEINDAILSIQTNVHALMDTVKLVEVELQKLPPHCIAGTSTLSRVVKDLHKLVTMAHEKKEQAKVLITDCERAHKQQTTRVLYERWTRDIIACLEAMETRHIFNGTELARLRDMAAAGGFDIHAVYPQARQVVAACETTAVTALDTVFRHNPYTPENTNIPPPLALLRGLTWFDDFSITAPVFTVMFPGVSIEGLLLLMRIRAVVLLSADTSINGIPNYRDMILRTSGDLLQIPALAGYVDFYTRSYDQFITESVTLSELRADIRQAAGAKLTEANKALEEVTHVRAHETAKLALKEGVFITLPSEGLLIRAIEYFTTFDHKRFIGTAYERVLQTMVDRDLKEANAELAQFRMVCQATKNRAIQILQNIVDTANATEQQEDVDFTNLKTLLKLTPPPKTIALAIDRSTSVQDIVTQFALLLGRLEEETGTLDIQAVDWMYQARNIIDSHPLSVRIDGTGPLHTYKDRVDKLYALRTKLDLLRRRIETGEVTWDDAWTTFKRETGDMLASGDTYATSVDSIKALQASASVVDMLCSEPEFFLLPVETKNRLQKKQQERKTALDVVLQKQRQFEETASRLRALIERIPTESDHDVLRMLLRDFDQFTHLPIWIKTQYMTFRNLLMVRLGLYASYAEIFPPASPNGVFAPIPAMSGVCLEDQSRCIRARVAAFMGEASVVQTFREARSSIDALFGKNLTFYLDTDGVPLRYRVCYKSVGVKLGTMLCSQGGLSLRPALPDEGIVEETTLSALRVANEVNELRIEYESAIKSGFSAFSTFVRHRHAEWGKTNARRAIAEIYAGLITTTLTRQYGVHWDKLIYSFEKHHLTSVMGNGLTKPIQRRGDVRVLELTLSDIVTILVATTPVHLLNFARLDLIKQHEYMARTLRPVIEAAFRGRLLVRSLDGDPKGNARAFFNAAPSKHKLPLALGSNQDPTGGRIFAFRMADWKLVKMPQKITDPFAPWQLSPPPGVKANVDAVTRIMATDRLATITVLGRMCLPPISLVSMWNTLQPEEFAYRTQDDVDIIVDARLDLSSTLNARFDTAPSNTTLEWNTDRKVITDAYIQTGATTVFTVTGAAPTHVSNVTAFDIATTAILFGAPLVIAMELTSVFSQNSGLTLGLKLFDSRHMATDSGISSAVSPDIVSWGLRLLHMDPHPIENACLIVQLEKLSALIANKPLTNNPPCLLLLDEHMNPSYVLWERKDSIPAPDYVVFWGPESLIDLPYIDSDEDSFPSCPDDPFYSQIIAGYAPQGPPNLDTTDFYPTEPLFKSPVQVVRSSKCKKMPVRPAQPAQPAQPAQPAQTVQPAQPIEPGTQIVVQNFKKPQSVKTTLSQKDIPLYVETESETAVLIPKQLTTSIKTTVCKSITPPNNQLSDWKNNPQQNQTLNQAFSKPILEITSIPTDDSISYRTWIEKSNQTQKRHQNDPRMYNSKTVFHPVNNQLPSWVDTAADAPQTDLLTNYKTRQPSPNFPRDVHTWGVSSNPFNSPNRDLYQSDFSEPSDGYSSESENSIVLSLDEHRSCRVPRHVRVVNADVVTGRRYVRGTALGALALLSQACRRMIDNVRYTRKLLMDHTEDIFQGLGYVKLLLDGTYI

SEQ ID NO: 20 - protein, 585 aa, Varicella zoster
MDRVESEEPMDGFESPVFSENTSSNSGWCSDAFSDSYIAYNPALLLKNDLLFSELLFASHLINVPRAIENNVTYEASSAVGVDNEMTSSTTEFIEEIGDVLALDRACLVCRTLDLYKRKFGLTPEWVADYAMLCMKSLASPPCAVVTFSAAFEFVYLMDRYYLCRYNVTLVGSFARRTLSLLDIQRHFFLHVCFRTDGGLPGIRPPPGKEMANKVRYSNYSFFVQAVVRAALLSISTSRLDETETRKSFYFNQDGLTGGPQPLAAALANWKDCARMVDCSSSEHRTSGMITCAERALKEDIEFEDILIDKLKKSSYVEAAWGYADLALLLLSGVATWNVDERTNCAIETRVGCVKSYWQANRIENSRDVPKQFSKFTSEDACPEVAFGPILLTTLKNAKCRGRTNTECMLCCLLTIGHYWIALRQFKRDILAYSANNTSLFDCIEPVINAWSLDNPIKLKFPFNDEGRFITIVKAAGSEAVYKHLFCDLLCALSELQTNPKILFAHPTTADKEVLELYKAQLAAQNRFEGRVCAGLWTLAYAFKAYQIFPRKPTANAAFIRDGGLMLRRHAISLVSLEHTLSKYV

SEQ ID NO: 21 - protein, 1204 aa, Varicella zoster
MENTQKTVTVPTGPLGYVYACRVEDLDLEEISFLAARSTDSDLALLPLMRNLTVEKTFTSSLAVVSGARTTGLAGAGITLKLTTSHFYPSVFVFHGGKHVLPSSAAPNLTRACNAARERFGFSRCQGPPVDGAVETTGAEICTRLGLEPENTILYLVVTALFKEAVFMCNVFLHYGGLDIVHINHGDVIRIPLFPVQLFMPDVNRLVPDPFNTHHRSIGEGFVYPTPFYNTGLCHLIHDCVIAPMAVALRVRNVTAVARGAAHLAFDENHEGAVLPPDITYTYFQSSSSGTTTARGARRNDVNSTSKPSPSGGFERRLASIMAADTALHAEVIFNTGIYEETPTDIKEWPMFIGMEGTLPRLNALGSYTARVAGVIGAMVFSPNSALYLTEVEDSGMTEAKDGGPGPSFNRFYQFAGPHLAANPQTDRDGHVLSSQSTGSSNTEFSVDYLALICGFGAPLLARLLFYLERCDAGAFTGGHGDALKYVTGTFDSEIPCSLCEKHTRPVCAHTTVHRLRQRMPRFGQATRQPIGVFGTMNSQYSDCDPLGNYAPYLILRKPGDQTEAAKATMQDTYRATLERLFIDLEQERLLDRGAPCSSEGLSSVIVDHPTFRRILDTLRARIEQTTTQFMKVLVETRDYKIREGLSEATHSMALTFDPYSGAFCPITNFLVKRTHLAVVQDLALSQCHCVFYGQQVEGRNFRNQFQPVLRRRFVDLFNGGFISTRSITVTLSEGPVSAPNPTLGQDAPAGRTFDGDLARVSVEVIRDIRVKNRVVFSGNCTNLSEAARARLVGLASAYQRQEKRVDMLHGALGFLLKQFHGLLFPRGMPPNSKSPNPQWFWTLLQRNQMPADKLTHEEITTIAAVKRFTEEYAAINFINLPPTCIGELAQFYMANLILKYCDHSQYLINTLTSIITGARRPRDPSSVLHWIRKDVTSAADIETQAKALLEKTENLPELWTTAFTSTHLVRAAMNQRPMVVLGISISKYHGAAGNNRVFQAGNWSGLNGGKNVCPLFTFDRTRRFIIACPRGGFICPVTGPSSGNRETTLSDQVRGIIVSGGAMVQLAIYATVVRAVGARAQHMAFDDWLSLTDDEFLARDLEELHDQIIQTLETPWTVEGALEAVKILDEKTTAGDGETPTNLAFNFDSCEPSHDTTSNVLNISGSNISGSTVPGLKRPPEDDELFDLSGIPIKHGNITMEMI

SEQ ID NO: 22 - protein, 770 aa, Varicella zoster
MELDINRTLLVLLGQVYTYIFQVELLRRCDPRVACRFLYRLAANCLTVRYLLKLFLRGFNTQLKFGNTPTVCALHWALCYVKGEGERLFELLQHFKTRFVYGETKDSNCIKDYFVSAFNLKTCQYHHELSLTTYGGYVSSEIQFLHDIENFLKQLNYCYIITSSREALNTLETVTRFMTDTIGSGLIPPVELFDPAHPCAICFEELCITANQGETLHRRLLGCICDHVTKQVRVNVDVDDIIRCLPYIPDVPDIKRQSAVEALRTLQTKTVVNPMGAKNDTFDQTYEIASTMLDSYNVFKPAPRCMYAISELKFWLTSNSTEGPQRTLDVFVDNLDVLNEHEKHAELTAVTVELALFGKTPIHFDRAFSEELGSLDAIDSILVGNRSSSPDSQIEALIKACYAHHLSSPLMRHISNPSHDNEAALRQLLERVGCEDDLTKEASDSATASECDLNDDSSITFAVHGWENLLSKAKIDAAERKRVYLEHLSKRSLTSLGRCIREQRQELEKTLRVNVYGEALLQTFVSMQNGFGARNVFLAKVSQAGCIIDNRIQEAAFDAHRFIRNTLVRHTVDAAMLPALTHKFFELVNGPLFNHDEHRFAQPPNTALFFTVENVGLFPHLKEELAKFMGGVVGSNWLLSPFRGFYCFSGVEGVTFAQRLAWKYIRELVFATTLFTSVFHCGEVRLCRVDRLGKDPRGCTSQPKGIGSSHGPLDGIYLTYEETCPLVAIIQSGETGIDQNTVVIYDSDVFSLLYTLMQRLAPDSTDPAFS

SEQ ID NO: 23 - protein, 868 aa, Varicella zoster
MFVTAVVSVSPSSFYESLQVEPTQSEDITRSAHLGDGDEIREAIHKSQDAETKPTFYVCPPPTGSTIVRLEPTRTCPDYHLGKNFTEGIAVVYKENIAAYKFKATVYYKDVIVSTAWAGSSYTQITNRYADRVPIPVSEITDTIDKFGKCSSKATYVRNNHKVEAFNEDKNPQDMPLIASKYNSVGSKAWHTTNDTYMVAGTPGTYRTGTSVNCIIEEVEARSIFPYDSFGLSTGDIIYMSPFFGLRDGAYREHSNYAMDRFHQFEGYRQRDLDTRALLEPAARNFLVTPHLTVGWNWKPKRTEVCSLVKWREVEDVVRDEYAHNFRFTMKTLSTTFISETNEFNLNQIHLSQCVKEEARAIINRIYTTRYNSSHVRTGDIQTYLARGGFVVVFQPLLSNSLARLYLQELVRENTNHSPQKHPTRNTRSRRSVPVELRANRTITTTSSVEFAMLQFTYDHIQEHVNEMLARISSSWCQLQNRERALWSGLFPINPSALASTILDQRVKARILGDVISVSNCPELGSDTRIILQNSMRVSGSTTRCYSRPLISIVSLNGSGTVEGQLGTDNELIMSRDLLEPCVANHKRYFLFGHHYVYYEDYRYVREIAVHDVGMISTYVDLNLTLLKDREFMPLQVYTRDELRDTGLLDYSEIQRRNQMHSLRFYDIDKVVQYDSGTAIMQGMAQFFQGLGTAGQAVGHVVLGATGALLSTVHGFTTFLSNPFGALAVGLLVLAGLVAAFFAYRYVLKLKTSPMKALYPLTTKGLKQLPEGMDPFAEKPNATDTPIEEIGDSQNTEPSVNSGFDPDKFREAQEMIKYMTLVSAAERQESKARKKNKTSALLTSRLTGLALRNRRGYSRVRTENVTGV

SEQ ID NO: 24 - protein, 143 aa, Varicella zoster
MESSNINALQQPSSIAHHPSKQCASSLNETVKDSPPAIYEDRLEHTPVQLPRDGTPRDVCSVGQLTCRACATKPFRLNRDSQYDYLNTCPGGRHISLALEIITGRWVCIPRVFPDTPEEKWMAPYIIPDREQPSSGDEDSDTD

SEQ ID NO: 25 - protein, 341 aa, Varicella zoster
MSTDKTDVKMGVLRIYLDGAYGIGKTTAAEEFLHHFAITPNRILLIGEPLSYWRNLAGEDAICGIYGTQTRRLNGDVSPEDAQRLTAHFQSLFCSPHAIMHAKISALMDTSTSDLVQVNKEPYKIMLSDRHPIASTICFPLSRYLVGDMSPAALPGLLFTLPAEPPGTNLVVCTVSLPSHLSRVSKRARPGETVNLPFVMVLRNVYIMLINTIIFLKTNNWHAGWNTLSFCNDVFKQKLQKSECIKLREVPGIEDTLFAVLKLPELCGEFGNILPLWAWGMETLSNCSRSMSPFVLSLEQTPQHAAQELKTLLPQMTPANMSSGAWNILKELVNAVQDNTS

SEQ ID NO: 26 - protein, 841 aa, Varicella zoster
MFALVLAVVILPLWTTANKSYVTPTPATRSIGHMSALLREYSDRNMSLKLEAFYPTGFDEELIKSLHWGNDRKHVFLVIVKVNPTTHEGDVGLVIFPKYLLSPYHFKAEHRAPFPAGRFGFLSHPVTPDVSFFDSSFAPYLTTQHLVAFTTFPPNPLVWHLERAETAATAERPFGVSLLPARPTVPKNTILEHKAHFATWDALARHTFFSAEAIITNSTLRIHVPLFGSVWPIRYWATGSVLLTSDSGRVEVNIGVGFMSSLISLSSGPPIELIVVPHTVKLNAVTSDTTWFQLNPPGPDPGPSYRVYLLGRGLDMNFSKHATVDICAYPEESLDYRYHLSMAHTEALRMTTKADQHDINEESYYHIAARIATSIFALSEMGRTTEYFLLDEIVDVQYQLKFLNYILMRIGAGAHPNTISGTSDLIFADPSQLHDELSLLFGQVKPANVDYFISYDEARDQLKTAYALSRGQDHVNALSLARRVIMSIYKGLLVKQNLNATERQALFFASMILLNFREGLENSSRVLDGRTTLLLMTSMCTAAHATQAALNIQEGLAYLNPSKHMFTIPNVYSPCMGSLRTDLTEEIHVMNLLSAIPTRPGLNEVLHTQLDESEIFDAAFKTMMIFTTWTAKDLHILHTHVPEVFTCQDAAARNGEYVLILPAVQGHSYVITRNKPQRGLVYSLADVDVYNPISVVYLSRDTCVSEHGVIETVALPHPDNLKECLYCGSVFLRYLTTGAIMDIIIIDSKDTERQLAAMGNSTIPPFNPDMHGDDSKAVLLFPNGTVVTLLGFERRQAIRMSGQYLGASLGGAFLAVVGFGIIGWMLCGNSRLREYNKIPLT

SEQ ID NO: 27 - protein, 240 aa, Varicella zoster
MNPPQARVSEQTKDLLSVMVNQHPEEDAKVCKSSDNSPLYNTMVMLSYGGDTDLLLSSACTRTSTVNRSAFTQHSVFYIISTVLIQPICCIFFFFYYKATRCMLLFTAGLLLTILHHFRLIIMLLCVYRNIRSDLLPLSTSQQLLLGIIVVTRTMLFCITAYYTLFIDTRVFFLITGHLQSEVIFPDSVSKILPVSWGPSPAVLLVMAAVIYAMDCLVDTVSFIGPRVWVRVMLKTSISF

SEQ ID NO: 28 - protein, 1396 aa, Varicella zoster
MTTVSCPANVITTTESDRIAGLFNIPAGIIPTGNVLSTIEVCAHRCIFDFFKQIRSDDNSLYSAQFDILLGTYCNTLNFVRFLELGLSVACICTKFPELAYVRDGVIQFEVQQPMIARDGPHPVDQPVHNYMVKRIHKRSLSAAFAIASEALSLLSNTYVDGTEIDSSLRIRAIQQMARNLRTVLDSFERGTADQLLGVLLEKAPPLSLLSPINKFQPEGHLNRVARAALLSDLKRRVCADMFFMTRHAREPRLISAYLSDMVSCTQPSVMVSRITHTNTRGRQVDGVLVTTATLKRQLLQGILQIDDTAADVPVTYGEMVLQGTNLVTALVMGKAVRGMDDVARHLLDITDPNTLNIPSIPPQSNSDSTTAGLPVNARVPADLVIVGDKLVFLEALERRVYQATRVAYPLIGNIDITFIMPMGVFQANSMDRYTRHAGDFSTVSEQDPRQFPPQGIFFYNKDGILTQLTLRDAMGTICHSSLLDVEATLVALRQQHLDRQCYFGVYVAEGTEDTLDVQMGRFMETWADMMPHHPHWVNEHLTILQFIAPSNPRLRFELNPAFDFFVAPGDVDLPGPQRPPEAMPTVNATLRIINGNIPVPLCPISFRDCRGTQLGLGRHTMTPATIKAVKDTFEDRAYPTIFYMLEAVIHGNERNFCALLRLLTQCIRGYWEQSHRVAFVNNFHMLMYITTYLGNGELPEVCINIYRDLLQHVRALRQTITDFTIQGEGHNGETSEALNNILTDDTFIAPILWDCDALIYRDEAARDRLPAIRVSGRNGYQALHFVDMAGHNFQRRDNVLIHGRPVRGDTGQGIPITPHHDREWGILSKIYYYIVIPAFSRGSCCTMGVRYDRLYPALQAVIVPEIPADEEAPTTPEDPRHPLHAHQLVPNSLNVYFHNAHLTVDGDALLTLQELMGDMAERTTAILVSSAPDAGAATATTRNMRIYDGALYHGLIMMAYQAYDETIATGTFFYPVPVNPLFACPEHLASLRGMTNARRVLAKMVPPIPPFLGANHHATIRQPVAYHVTHSKSDFNTLTYSLLGGYFKFTPISLTHQLRTGFHPGIAFTVVRQDRFATEQLLYAERASESYFVGQIQVHHHDAIGGVNFTLTQPRAHVDLGVGYTAVCATAALRCPLTDMGNTAQNLFFSRGGVPMLHDNVTESLRRITASGGRLNPTEPLPIFGGLRPATSAGIARGQASVCEFVAMPVSTDLQYFRTACNPRGRASGMLYMGDRDADIEAIMFDHTQSDVAYTDRATLNPWASQKHSYGDRLYNGTYNLTGASPIYSPCFKFFTPAEVNTNCNTLDRLLMEAKAVASQSSTDTEYQFKRPPGSTEMTQDPCGLFQEAYPPLCSSDAAMLRTAHAGETGADEVHLAQYLIRDASPLRGCLPLPR

SEQ ID NO: 29 - protein, 316 aa, Varicella zoster
MAMPFEIEVLLPGELSPAETSALQKCEGKIITFSTLRHRASLVDIALSSYYINGAPPDTLSLLEAYRMRFAAVITRVIPGKLLAHAIGVGTPTPGLFIQNTSPVDLCNGDYICLLPPVFGSADSIRLDSVGLEIVFPLTIPQTLMREIIAKVVARAVERTAAGAQILPHEVLRGADVICYNGRRYELETNLQHRDGSDAAIRTLVLNLMFSINEGCLLLLALIPTLLVQGAHDGYVNLLIQTANCVRETGQLINIPPMPRIQDGHRRFPIYETISSWISTSSRLGDTLGTRAILRVCVFDGPSTVHPGDRTAVIQV

SEQ ID NO: 30 - protein, 676 aa, Varicella zoster
MEAHLANETKHALWHNDHTKGLLHVVIPNAGLIAAGIDPALLILKKPGQRFKVEVQTRYHATGQCEPWCQVFAAYIPDNALTNLLIPKTEPFVSHVFSATHNSGGLILSLPVYLSPGLFFDAFNVVAIRINTGNRKHRDICIMYAELIPNGTRYFADGQRVLLLCKQLIAYIRCTPRLASSIKIYAEHMVAAMGESHTSNGDNIGPVSSIIDLDRQLTSGGIDDSPAETRIQENNRDVLELIKRAVNIVNSRHPVRPSSSRVASGLLQSAKGHGAQTSNTDPINNGSFDGVLEPPGQGRFTGKKNNSSASIPPLQDVLLFTPASTEPQSLMEWFDICYAQLVSGDTPADFWKRRPLSIVPRHYAESPSPLIVVSYNGSSAWGGRITGSPILYHSAQAIIDAACINARVDNPQSLHVTARQELVARLPFLANVLNNQTPLPAFKPGAEMFLNQVFKQACVTSLTQGLITELQTNPTLQQLMEYDIADSSQTVIDEIVARTPDLIQTIVSVLTEMSMDAFYNSSLMYAVLAYLSSVYTRPQGGGYIPYLHASFPCWLGNRSIYLFDYYNSGGEILKLSKVPVPVALEKVGIGNSTQLRGKFIRSADIVDIGICSKYLPGQCYAYICLGFNQQLQSILVLPGGFAACFCITDTLQAALPASLIGPILDRFCFSIPNPHK

SEQ ID NO: 31 - protein, 363 aa, Varicella zoster
MELQRIFPLYTATGAARKLTPEAVQRLCDALTLDMGLWKSILTDPRVKIMRSTAFITLRIAPFIPLQTDTTNIAVVVATIYITRPRQMNLPPKTFHVIVNFNYEVSYAMTATLRIYPVENIDHVFGATFKNPIAYPLPTSIPDPRADPTPADLTPTPNLSNYLQPPRLPKNPYACKVISPGVWWSDERRRLYVLAMEPNLIGLCPAGWHARILGSVLNRLLSHADGCDECNHRVHVGALYALPHVTNHAEGCVCWAPCMWRKAGQRELKVEVDIGATQVLFVDVTTCIRITSTKNPRITANLGDVIAGTNASGLSVPVNSSGWQLYMFGETLSRAIINGCGLLQRICFPETQRLSGEPEPTTT

SEQ ID NO: 32 - protein, 199 aa, Varicella zoster
MSGHTPTYASHRRNRVKLVEAHNRAGLFKERTLDLIRGGASVQDPAFVYAFTAAKEACADLNNQLRSAARIASVEQKIRDIQSKVEEQTSIQQILNTNRRYIAPDFIRGLDKTEDDNTDNIDRLEDAVGPNIEHENHTWFGEDDEALLTQWMLTTHPPTSKYLQLQDLCVPTTIPTDMNQMQPQPISKNENPPTPHTDV

SEQ ID NO: 33 - protein, 551 aa, Varicella zoster
MARSGLDRIDISPQPAKKIARVGGLQHPFVKTDINTINVEHHFIDTLQKTSPNMDCRGMTAGIFIRLSHMYKILTTLESPNDVTYTTPGSTNALFFKTSTQPQEPRPEELASKLTQDDIKRILLTIESETRGQGDNAIWTLLRRNLITASTLKWSVSGPVIPPQWFYHHNTTDTYGDAAAMAFGKTNEPAARAIVEALFIDPADIRTPDHLTPEATTKFFNFDMLNTKSPSLLVGTPRIGTYECGLLIDVRTGLIGASLDVLVCDRDPLTGTLNPHPAETDISFFEIKCRAKYLFDPDDKNNPLGRTYTTLINRPTMANLRDFLYTIKNPCVSFFGPSANPSTREALITDHVEWKRLGFKGGRALTELDAHHLGLNRTISSRVWVFNDPDIQKGTITTIAWATGDTALQIPVFANPRHANFKQIAVQTYVLSGYFPALKLRPFLVTFIGRVRRPHEVGVPLRVDTQAAAIYEYNWPTIPPHCAVPVIAVLTPIEVDVPRVTQILKDTGNNAITSALRSLRWDNLHPAVEEESVDCANGTTSLLRATEKPLL

SEQ ID NO: 34 - protein, 835 aa, Varicella zoster
MSPNTGESNAAVYASSTQLARALYGGDLVSWIKHTHPGISLELQLDVPVKLIKPGMSQTRPVTVVRAPMGSGKTTALLEWLQHALKADISVLVVSCRRSFTQTLIQRFNDAGLSGFVTYLTSETYIMGFKRLIVQLESLHRVSSEAIDSYDVLILDEVMSVIGQLYSPTMRRLSAVDSLLYRLLNRCSQIIAMDATVNSQFIDLISGLRGDENIHTIVCTYAGVGFSGRTCTILRDMGIDTLVRVIKRSPEHEDVRTIHQLRGTFFDELALRLQCGHNICIFSSTLSFSELVAQFCAIFTDSILILNSTRPLCNVNEWKHFRVLVYTTVVTVGLSFDMAHFHSMFAYIKPMSYGPDMVSVYQSLGRVRLLLLNEVLMYVDGSRTRCGPLFSPMLLNFTIANKFQWFPTHTQITNKLCCAFRQRCANAFTRSNTHLFSRFKYKHLFERCSLWSLADSINILQTLLASNQILVVLDGMGPITDVSPVQFCAFIHDLRHSANAVASCMRSLRQDNDSCLTDFGPSGFMADNITAFMEKYLMESINTEEQIKVFKALACPIEQPRLVNTAILGACIRIPEALEAFDVFQKIYTHYASGWFPVLDKTGEFSIATITTAPNLTTHWELFRRCAYIAKTLKWNPSTEGCVTQVLDTDINTLFNQHGDSLAQLIFEVMRCNVTDAKIILNRPVWRTTGFLDGCHNQCFRPIPTKHEYNIALFRLIWEQLFGARVTKSTQTFPGSTRVKNLKKKDLETLLDSINVDRSACRTYRQLYNLLMSQRHSFSQQRYKITAPAWARHVYFQAHQMHLAPHAEAMLQLALSELSPGSWPRINGAVNFESL

SEQ ID NO: 35 - protein, 771 aa, Varicella zoster
MDATQITLVRESGHICAASIYTSWTQSGQLTQNGLSVLYYLLCKNSCGKYVPKFAEITVQQEDLCRYSRHGGSVSAATFASICRAASSAALDAWPLEPLGNADTWRCLHGTALATLRRVLGFKSFYSPVTFETDTNTGLLLKTIPDEHALNNDNTPSTGVLRANFPVAIDVSAVSACNAHTQGTSLAYARLTALKSNGDTQQQTPLDVEVITPKAYIRRKYKSTFSPPIEREGQTSDLFNLEERRLVLSGNRAIVVRVLLPCYFDCLTTDSTVTSSLSILATYRLWYAAAFGKPGVVRPIFAYLGPELNPKGEDRDYFCTVGFPGWTTLRTQTPAVESIRTATEMYMETDGLWPVTGIQAFHYLAPWGQHPPLPPRVQDLIGQIPQDTGHADATVNWDAGRISTVFKQPVQLQDRWMAKFDFSAFFPTIYCAMFPMHFRLGKIVLARMRRGMGCLKPALVSFFGGLRHILPSIYKAIIFIANEISLCVEQTALEQGFAICTYIKDGFWGIFTDLHTRNVCSDQARCSALNLAATCERAVTGLLRIQLGLNFTPAMEPVLRVEGVYTHAFTWCTTGSWLWNLQTNTPPDLVGVPWRSQAARDLKERLSGLLCTATKIRERIQENCIWDHVLYDIWAGQVVEAARKTYVDFFEHVFDRRYTPVYWSLQEQNSETKAIPASYLTYGHMQDKDYKPRQIIMVRNPNPHGPPTVVYWELLPSCACIPPIDCAAHLKPLIHTFVTIINHLLDAHNDFSSPSLKFTDDPLASYNFLFL

SEQ ID NO: 36 - protein, 881 aa, Varicella zoster
MKRSISVDSSSPKNVFNPETPNGFDDSVYLNFTSMHSIQPILSRIRELAAITIPKERVPRLCWFKQLLELQAPPEMQRNELPFSVYLISGNAGSGKSTCIQTLNEAIDCIITGSTRVAAQNVHAKLSTAYASRPINTIFHEFGFRGNHIQAQLGRYAYNWTTTPPSIEDLQKRDIVYYWEVLIDITKRVFQMGDDGRGGTSTFKTLWAIERLLNKPTGSMSGTAFIACGSLPAFTRSNVIVIDEAGLLGRHILTAVVYCWWLLNAIYQSPQYINGRKPVIVCVGSPTQTDSLESHFQHDMQRSHVTPSENILTYIICNQTLRQYTNISHNWAIFINNKRCQEDDFGNLLKTLEYGLPITEAHARLVDTFVVPASYINNPANLPGWTRLYSSHKEVSAYMSKLHAHLKLSKNDHFSVFALPTYTFIRLTAFDEYRKLTGQPGLSVEHWIRANSGRLHNYSQSRDHDMGTVKYETHSNRDLIVARTDITYVLNSLVVVTTRLRKLVIGFSGTFQSFAKVLRDDSFVKARGETSIEYAYRFLSNLIFGGLINFYNFLLNKNLHPDKVSLAYKRLAALTLELLSGTNKAPLHEAAVNGAGAGIDCDGAATSADKAFCFTKAPESKVTASIPEDPDDVIFTALNDEVIDLVYCQYEFSYPKSSNEVHAQFLLMKAIYDGRYAILAELFESSFTTAPFSAYVDNVNFNGSELLIGNVRGGLLSLALQTDTYTLLGYTFAPVPVFVEELTRKKLYRETTEMLYALHVPLMVLQDQHGFVSIVNANVCEFTESIEDAELAMATTVDYGLSSKLAMTIARSQGLSLEKVAICFTADKLRLNSVYVAMSRTVSSRFLKMNLNPLRERYEKSAEISDHILAALRDPNVHVVY

SEQ ID NO: 37 - protein, 278 aa, Varicella zoster
MFCTSPATRGDSSESKPGASVDVNGKMEYGSAPGPLNGRDTSRGPGAFCTPGWEIHPARLVEDINRVFLCIAQSSGRVTRDSRRLRRICLDFYLMGRTRQRPTLACWEELLQLQPTQTQCLRATLMEVSHRPPRGEDGFIEAPNVPLHRSALECDVSDDGGEDDSDDDGSTPSDVIEFRDSDAESSDGEDFIVEEESEESTDSCEPDGVPGDCYRDGDGCNTPSPKRPQRAIERYAGAETAEYTAAKALTALGEGGVDWKRRRHEAPRRHDIPPPHGV

SEQ ID NO: 38 - protein, 180 aa, Varicella zoster
MNLCGSRGEHPGGEYAGLYCTRHDTPAHQALMNDAERYFAAALCAISTEAYEAFIHSPSERPCASLWGRAKDAFGRMCGELAADRQRPPSVPPIRRAVLSLLREQCMPDPQSHLELSERLILMAYWCCLGHAGLPTIGLSPDNKCIRAELYDRPGGICHRLFDAYLGCGSLGVPRTYERS

SEQ ID NO: 39 - protein, 393 aa, Varicella zoster
MNDVDATDTFVGQGKFRGAISTSPSHIMQTCGFIQQMFPVEMSPGIESEDDPNYDVNMDIQSFNIFDGVHETEAEASVALCAEARVGINKAGFVILKTFTPGAEGFAFACMDSKTCEHVVIKAGQRQGTATEATVLRALTHPSVVQLKGTFTYNKMTCLILPRYRTDLYCYLAAKRNLPICDILAIQRSVLRALQYLHNNSIIHRDIKSENIFINHPGDVCVGDFGAACFPVDINANRYYGWAGTIATNSPELLARDPYGPAVDIWSAGIVLFEMATGQNSLFERDGLDGNCDSERQIKLIIRRSGTHPNEFPINPTSNLRRQYIGLAKRSSRKPGSRPLWTNLYELPIDLEYLICKMLSFDARHRPSAEVLLNHSVFQTLPDPYPNPMEVGD

SEQ ID NO: 40 - protein, 354 aa, Varicella zoster
MFLIQCLISAVIFYIQVTNALIFKGDHVSLQVNSSLTSILIPMQNDNYTEIKGQLVFIGEQLPTGTNYSGTLELLYADTVAFCFRSVQVIRYDGCPRIRTSAFISCRYKHSWHYGNSTDRISTEPDAGVMLKITKPGINDAGVYVLLVRLDHSRSTDGFILGVNVYTAGSHHNIHGVIYTSPSLQNGYSTRALFQQARLCDLPATPKGSGTSLFQHMLDLRAGKSLEDNPWLHEDVVTTETKSVVKEGIENHVYPTDMSTLPEKSLNDPPENLLIIIPIVASVMILTAMVIVIVISVKRRRIKKHPIYRPNTKTRRGIQNATPESDVMLEAAIAQLATIREESPPHSVVNPFVK

SEQ ID NO: 41 - protein, 623 aa, Varicella zoster
MGTVNKPVVGVLMGFGIITGTLRITNPVRASVLRYDDFHTDEDKLDTNSVYEPYYHSDHAESSWVNRGESSRKAYDHNSPYIWPRNDYDGFLENAHEHHGVYNQGRGIDSGERLMQPTQMSAQEDLGDDTGIHVIPTLNGDDRHKIVNVDQRQYGDVFKGDLNPKPQGQRLIEVSVEENHPFTLRAPIQRIYGVRYTETWSFLPSLTCTGDAAPAIQHICLKHTTCFQDVVVDVDCAENTKEDQLAEISYRFQGKKEADQPWIVVNTSTLFDELELDPPEIEPGVLKVLRTEKQYLGVYIWNMRGSDGTSTYATFLVTWKGDEKTRNPTPAVTPQPRGAEFHMWNYHSHVFSVGDTFSLAMHLQYKIHEAPFDLLLEWLYVPIDPTCQPMRLYSTCLYHPNAPQCLSHMNSGCTFTSPHLAQRVASTVYQNCEHADNYTAYCLGISHMEPSFGLILHDGGTTLKFVDTPESLSGLYVFVVYFNGHVEAVAYTVVSTVDHFVNAIEERGFPPTAGQPPATTKPKEITPVNPGTSPLLRYAAWTGGLAAVVLLCLVIFLICTAKRMRVKAYRVDKSPYNQSMYYAGLPVDDFEDSESTDTEEEFGNAIGGSHGGSSYTVYIDKTR

SEQ ID NO: 42 - protein, 1310 aa, Varicella zoster
MDTPPMQRSTPQRAGSPDTLELMDLLDAAAAAAEHRARVVTSSQPDDLLFGENGVMVGREHEIVSIPSVSGLQPEPRTEDVGEELTQDDYVCEDGQDLMGSPVIPLAEVFHTRFSEAGAREPTGADRSLETVSLGTKLARSPKPPMNDGETGRGTTPPFPQAFSPVSPASPVGDAAGNDQREDQRSIPRQTTRGNSPGLPSVVHRDRQTQSISGKKPGDEQAGHAHASGDGVVLQKTQRPAQGKSPKKKTLKVKVPLPARKPGGPVPGPVEQLYHVLSDSVPAKGAKADLPFETDDTRPRKHDARGITPRVPGRSSGGKPRAFLALPGRSHAPDPIEDDSPVEKKPKSREFVSSSSSSSSWGSSSEDEDDEPRRVSVGSETTGSRSGREHAPSPSNSDDSDSNDGGSTKQNIQPGYRSISGPDPRIRKTKRLAGEPGRQRQKSFSLPRSRTPIIPPVSGPLMMPDGSPWPGSAPLPSNRVRFGPSGETREGHWEDEAVRAARARYEASTEPVPLYVPELGDPARQYRALINLIYCPDRDPIAWLQNPKLTGVNSALNQFYQKLLPPGRAGTAVTGSVASPVPHVGEAMATGEALWALPHAAAAVAMSRRYDRAQKHFILQSLRRAFASMAYPEATGSSPAARISRGHPSPTTPATQAPDPQPSAAARSLSVCPPDDRLRTPRKRKSQPVESRSLLDKIRETPVADARVADDHVVSKAKRRVSEPVTITSGPVVDPPAVITMPLDGPAPNGGFRRIPRGALHTPVPSDQARKAYCTPETIARLVDDPLFPTAWRPALSFDPGALAEIAARRPGGGDRRFGPPSGVEALRRRCAWMRQIPDPEDVRLLIIYDPLPGEDINGPLESTLATDPGPSWSPSRGGLSVVLAALSNRLCLPSTHAWAGNWTGPPDVSALNARGVLLLSTRDLAFAGAVEYLGSRLASARRRLLVLDAVALERWPRDGPALSQYHVYVRAPARPDAQAVVRWPDSAVTEGLARAVFASSRTFGPASFARIETAFANLYPGEQPLCLCRGGNVAYTVCTRAGPKTRVPLSPREYRQYVLPGFDGCKDLARQSRGLGLGAADFVDEAAHSHRAANRWGLGAALRPVFLPEGRRPGAAGPEAGDVPTWARVFCRHALLEPDPAAEPLVLPPVAGRSVALYASADEARNALPPIPRVMWPPGFGAAETVLEGSDGTRFVFGHHGGSERPSETQAGRQRRTADDREHALELDDWEVGCEDAWDSEEGGGDDGDAPGSSFGVSIVSVAPGVLRDRRVGLRPAVKVELLSSSSSSEDEDDVWGGRGGRSPPQSRG

SEQ ID NO: 43 - DNA, 1002 bp, Varicella zoster
  CDS (1)..(1002)
atgcatttaaagcctaccagatttttccacgcaaaccaaccgccaatgccgcattcatacgagatggaggacttatgcttcgacgacatgcaatatcgctggtctccctcgaacacaccctatcgaagtatgtctaggcgatataaatccgtatctcggagcgggccttcgatgcgtgtacgctccagaacgccatgccgccgtcaaaccattcgaggaaaacttatgtcaaaggagcggtctgtgtaccgccattattttaattacatcgcaaggtcccccccagaagaactagctaccgttagaggcttaatcgtgccaattattaagacgacccctgtcacccttccgtttaacttgggtcagacagtggcggataactgcctgtcgttatccggaatgggttatcatttaggtctcggaggttattgtccgacatgcactgcatctggagaaccgcgtctatgtcgaaccgatcgggcggctctgatactagcatatgttcagcagcttaacaacatatacgaatatcgtgtgtttcttgcatccattttggcgctatcagaccgagccaacatgcaagcagcgtccgctgaacccctattgtcgagcgtattggcacaaccggaattattttttatgtatcatattatgagggaggggggcatgcgagatatacgcgtacttttttatcgtgatggagatgccggagggtttatgatgtatgttatatttccggggaaatctgttcacctccattacagactaatcgatcatatacaggccgcgtgtcgggggtataaaatagtcgcacacgtttggcagacaacatttttactgtcggtatgtcgcaacccagaacaacaaacagagactgtggtgccatccattggaacatcggacgtttactgtaaaatgtgtgaccttaactttgatggagaattgcttttggaatacaaaagactctacgcattatttgatgactttgttcctcctcggtga

SEQ ID NO: 44 - protein, 333 aa, Varicella zoster
MHLKPTRFFHANQPPMPHSYEMEDLCFDDMQYRWSPSNTPYRSMSRRYKSVSRSGPSMRVRSRTPCRRQTIRGKLMSKERSVYRHYFNYIARSPPEELATVRGLIVPIIKTTPVTLPFNLGQTVADNCLSLSGMGYHLGLGGYCPTCTASGEPRLCRTDRAALILAYVQQLNNIYEYRVFLASILALSDRANMQAASAEPLLSSVLAQPELFFMYHIMREGGMRDIRVLFYRDGDAGGFMMYVIFPGKSVHLHYRLIDHIQAACRGYKIVAHVWQTTFLLSVCRNPEQQTETVVPSIGTSDVYCKMCDLNFDGELLLEYKRLYALFDDFVPPR

SEQ ID NO: 45 - DNA, 1533 bp, Varicella zoster
  CDS (1)..(1533)
atggatgctgacgacacaccccccaacctccaaatatctccaactgcaggacctttgcgttcccaccacaataccgacggacatgaaccaaatgcaaccgcagccgatcagcaagaacgagaatccaccaaccccacacacggatgtgtaaatcatccatgggccaatccgtcaactgcaacatgcatggaatcaccagaacgatcacaacagacaagcttatttttattaaagcacggcttaacgagagatccaatacatcaacgcgaaagggtggacgtttttccacaatttaacaaacccccatgggtttttagaatttccaaattatcccgtttaattgtacccatcttcacgctcaatgaacagttatgtttttctaaattacagattcgagatagacccaggtttgcgggacggggaacgtatgggcgtgttcatatatacccatcgtcaaaaatagctgtaaaaaccatggacagtcgtgtttttaatagagagttaattaacgcgattttagcgagtgagggttctatacgagcaggggaaaggctaggtatttctagcatagtttgccttttaggtttttcgttacaaaccaaacagctactgtttccggcatacgacatggatatggatgaatacattgttcgcctgtccagacggttgacaatacctgatcacatagacagaaaaattgcccatgtatttttagatttggctcaagcgttgacgtttttaaatcgaacgtgcggcctgacccacctagatgtgaaatgtggcaatatttttcttaacgtcgacaactttgcctcgttggaaataaccacagcagtaatcggagactatagcctagtaacattaaatacgtattccctttgtactcgagcgatatttgaagttggaaatccatcccacccggagcacgtactacgcgtaccccgggatgcatcgcagatgtcatttcgtttggtgttgagtcatggaacaaaccaaccccctgaaatcttgcttgattatattaatggaacgggccttactaaatatactggaaccttgccccaaagagttggacttgcgattgatctttatgcattgggccaagcactcttagaagttatcctgctaggacgtcttcccggacaactgcccatttcagtacatcggaccccgcattatcactactacggtcataagttatcaccagatttggcgcttgatacgctggcatatcgatgtgtcctggcgccatatatactcccatctgacatccccggggacttaaattataatccctttatacacgccggagagctgaacacccgtatttcccggaattctttacgccggatattccagtgtcacgcagtgcgttacggcgtaacgcactcaaagcttttcgaaggcatacgcattccggcctcattatacccagccactgttgttacatcgttgttgtgtcacgataattcagaaatacgctcggatcaccctttattatggcacgatcgggattggataggatcgacataa

SEQ ID NO: 46 - protein, 510 aa, Varicella zoster
MDADDTPPNLQISPTAGPLRSHHNTDGHEPNATAADQQERESTNPTHGCVNHPWANPSTATCMESPERSQQTSLFLLKHGLTRDPIHQRERVDVFPQFNKPPWVFRISKLSRLIVPIFTLNEQLCFSKLQIRDRPRFAGRGTYGRVHIYPSSKIAVKTMDSRVFNRELINAILASEGSIRAGERLGISSIVCLLGFSLQTKQLLFPAYDMDMDEYIVRLSRRLTIPDHIDRKIAHVFLDLAQALTFLNRTCGLTHLDVKCGNIFLNVDNFASLEITTAVIGDYSLVTLNTYSLCTRAIFEVGNPSHPEHVLRVPRDASQMSFRLVLSHGTNQPPEILLDYINGTGLTKYTGTLPQRVGLAIDLYALGQALLEVILLGRLPGQLPISVHRTPHYHYYGHKLSPDLALDTLAYRCVLAPYILPSDIPGDLNYNPFIHAGELNTRISRNSLRRIFQCHAVRYGVTHSKLFEGIRIPASLYPATVVTSLLCHDNSEIRSDHPLLWHDRDWIGST

SEQ ID NO: 47 - DNA, 246 bp, Varicella zoster
  CDS (1)..(246)
atgggacaatcttcatccagcggtcgaggaggaatctgtggattgtgcaaacggtacaacgagcttgttacgtgcaacggagaaaccgttgctttgaactcagagttctttgaagactttgactttgatgagaatgtaacagaggacgccgataaatccacacaacgccgcccacgagtgatcgatgtaacaccaaaacgaaaaccttcgggaaagagctcccattccaaatgcgcaaaatgttaa

SEQ ID NO: 48 - protein, 81 aa, Varicella zoster
MGQSSSSGRGGICGLCKRYNELVTCNGETVALNSEFFEDFDFDENVTEDADKSTQRRPRVIDVTPKRKPSGKSSHSKCAKC

SEQ ID NO: 49 - DNA, 735 bp, Varicella zoster
  CDS (1)..(735)
atgaaaaatccgcagaaattagcgatcacattcttgccgctctacgtgatcccaacgtacacgttgtgtattaaagcattgtataaaaacacgcatgcgggcttgctgttctcatttctaggttttgtcttaaatacacccgccatgagcatctctggacccccaacgacgtttattttatataggttacatggggttaggcgggttcttcactggactttaccggatcatgaacaaacactctacgcatttacgggtgggtcaagatcaatggcggtgaagacggacgctcgatgtgatacaatgagcggtggtatgatcgtccttcaacacacccatacagtgaccctgctaaccatagactgttctactgacttttcatcatacgcatttacgcaccgggatttccacttacaggacaaaccccacgcaacatttgcgatgccgtttatgtcctgggtcggttctgacccaacatctcagctgtacagtaatgtggggggggtactatccgtaataacggaagatgacctatccatgtgtatctcaattgttatatacggtttacgggtaaacagacctgacgatcagaccacaccaacaccaaccccgcaccagtatacatcgcaaaggcggcagcctgaaaccaactgtccttcttcaccacaaccggcctttttcacatcagacgacgacgttctttcgttaatattacgggacgccgcaaacgcgtaa

SEQ ID NO: 50 - protein, 244 aa, Varicella zoster
MKNPQKLAITFLPLYVIPTYTLCIKALYKNTHAGLLFSFLGFVLNTPAMSISGPPTTFILYRLHGVRRVLHWTLPDHEQTLYAFTGGSRSMAVKTDARCDTMSGGMIVLQHTHTVTLLTIDCSTDFSSYAFTHRDFHLQDKPHATFAMPFMSWVGSDPTSQLYSNVGGVLSVITEDDLSMCISIVIYGLRVNRPDDQTTPTPTPHQYTSQRRQPETNCPSSPQPAFFTSDDDVLSLILRDAANA

SEQ ID NO: 51 - DNA, 124884 bp, Varicella zoster
  CDS (5569)..(6405)
  CDS (6553)..(7095)
  CDS (12245)..(12553)
  CDS (15752)..(19684)
  CDS (20400)..(21803)
  CDS (23666)..(24583)
  CDS (25259)..(25474)
  CDS (31035)..(32030)
  CDS (54592)..(56217)
  CDS (60132)..(60908)
  CDS (60975)..(62714)
  CDS (62747)..(64564)
  CDS (74249)..(77833)
  CDS (80267)..(80737)
  CDS (80864)..(81673)
  CDS (81747)..(82454)
  CDS (94410)..(95861)
  CDS (96040)..(98367)
  CDS (98392)..(99312)
  CDS (101091)..(102317)
  CDS (102407)..(103627)
  CDS (103772)..(105454)
  CDS (114218)..(115408)
  CDS (116308)..(119559)
  CDS (119611)..(120633)
  CDS (120744)..(122102)
  CDS (122438)..(122977)
  CDS (123970)..(124296)
cctctcccggggtccgccgggcgcccagaaaccgggggggggttattttcgggggggggtccgaccagcccgcccgtcgcccgcccgcacagacagacagacacttttttcataaaaaccgttccgcttttattaacaacaaacagtccgcgcgccagtggcgctcacgagaaaaggaggggactccgtcacccccgactctgcggggggctcctccccccgcgccctccccacacatcgtcctcgtcctcggaggacgaggacgaggacaacagctccaccttgaccgccgggcgcaaacccacccggcggtctcgcagcacacccggggccaccgacacgatgctcaccccaaaggatgaccccggtgcgtccccgtcgtccccgcccccctcctcgctgtcccacgcgtcttcacaccccacctcccaatcgtccagctccaaagcgtgttctctgtcgtctgcggtgcgccgctgtcgccccgcctgggtttctgacggccgttccgagcccccgtggtgtccgaacacgaaccgtgttccgtcgctcccctccaacaccgtctccgcggccccaaaaccgggcggccacattactctgggaatcggggggagggcattccgagcctcgtccgccgacgcatacagcgccaccgaccgaccggccacgggtggaagcacgagtggttctgcggcagggtcgggttccagcagggcgtggcggcaaaacaccctcgcccaggtgggtacgtcgccggcctccggcccggcggcccccggtctccgtccctcgggaaggaagacgggtcgaagcgcggcacccaggccccatcggtttgctgcgcggtggctatgtgccgcctcgtccacaaagtcggctgccccgagccccagaccccgagactgtcgcgcgaggtccttgcaaccgtcaaaacccggcagcacgtactgccggtattcacggggcgacagggggacgcgggtcttggggcccgcgcgggtacacacggtgtatgcgacgttcccaccgcggcacaaacacaggggttgttcgcccgggtacaggttggcaaacgcagtctcgatacgagcaaaactcgctggcccaaaggtgcgcgacgatgcaaacacggcccgggcgagtccttctgtgaccgccgagtctggccatcggacgacggcctgggcgtccggtcgcgccggggcccggacgtacacgtgatactgagacaaagcgggtccatccctgggccacctctcgagggccaccgcgtccaacaccagcaaccggcgccgggcagaggccaaccgcgagcctagatactcgacggccccggcaaaggccaggtctcgggtcgacagtaataaaacgccccgggcgttcaaagcggacacgtccggcgggccggtccagttcccggcccaggcatgagtgctcggcaggcacaaccggttactcagggctgccaggaccacagacagtccccctcgggatggactccatgacggtcccggatctgtcgcgagggtgctctcgagggggccgttgatgtcctctccgggcaacggatcgtagatgatcagaagcctcacatcctccgggtctgggatctgccgcatccaggcgcacctccgtcgcagcgcctccactccgctgggtggaccaaaccgtcggtctcctccgcccggacgccgagcggcgatttccgccaaggcgccgggatcaaagcttagcgcagggcgccaggccgtgggaaacaatgggtcgtcgaccagacgggcgatggtttcgggggtacagtacgccttgcgagcctggtccgacgggaccggggtatgcagggccccccggggaatacgccgaaatcccccgtttggggccggtccgtcaagtggcatcgttattacggcggggggatccaccacagggcccgaggtgatggtcacgggctcggatacccgcctcttggccttggaaaccacatgatcgtctgcaacccgggcgtccgcgacgggtgtctccctaatcttgtcgaggaggcttctgctctcgactggctgggacttgcgcttgcgcggagttcgtaaacgatcatccggtggacacacagaaagagagcgtgcggcggccgacggctgagggtcgggagcctgtgtggccggggttgttggagaagggtgaccgcgggagatccgcgccgccggactggagcccgttgcctcggggtatgccatgctggcaaaggctctgcggagactctgtaggataaagtgtttttgggcccggtcgtatcgacggctcatagccacggccgcggccgcgtgggggagagcccagagggcctcccccgtggccatggcttcgcctacatgcggaacgggagacgctacgctccccgtaacggcggtacccgcccgtcccggtggcaacagcttttggtagaactggttcagggccgagttgacaccggtcagcttggggttctggagccatgctatagggtctctgtctggacagtagatcaggttaatcagcgcgcggtactgtctagccggatctcccaactccggcacgtaaagcggcacgggttccgttgaggcctcgtaacgagcccgcgccgctctcacagcctcatcctcccagtgaccctctctggtctccccggacggtccaaaccgcaccctgttggatgggaggggtgccgatccgggccaagggcttccgtcgggcatcatgagcggccccgacaccgggggaattatcggggttctggatcgcggcagggaaaatgatttctgtctctggcgccccggttcccccgcaagacgtttggtcttacgaatcctcggatcgggaccgctgatggatcgatatcccggttggatattttgtttcgtcgacccaccatcatttgagtccgaatcatccgaatttgacggggaaggggcgtgttcgcgtccggacctgctgcctgtagtttcacttcccaccgaaacgcgccggggttcatcgtcttcatcctccgatgacgatccccacgacgaggaagaggatgaagacgaaacaaactcacgactctttggctttttctccactgggctgtcatcctcaatcgggtctggtgcgtgggatcttcccggcagggccaaaaacgctctaggtttgccccccgacgaacgtccagggacgcgaggtgttataccccgggcatcatgtttccttgggcgggtatcatcggtctcaaacggcaggtccgcctttgcccccttagcgggaacgctgtccgaaaggacgtggtacaattgctcaaccgggccgggtacaggtccaccgggtttccgcgccgggagtgggaccttaaccttcaaagtctttttcttcgggctctttccctgagcgggccgttgagttttctggagaactactccgtcccccgatgcatgcgcatgacccgcttgctcatcgcccggctttttacccgagatggactgagtttgtctgtctcgatggaccaccgacggcaaacctggtgaatttcctctcgtcgtttgtcggggtatagaccgctggtcttcccgttgatcgttcccggcggcgtctccaacaggagacgcgggggatacaggggagaaggcctgcgggaacggaggggtcgtacctctgcccgtttccccatcgttcatcggtggttttggagacctagcaagcttcgttccgagagagactgtctcaagggagcgatcggctcctgttggttctcgcgcgccggcctccgagaatcgggtgtggaagacctcggccagcgggattacaggcgagcccattagatcctgaccgtcctcgcatacgtagtcgtcttgtgttagctcttcgccaacatcttccgttctgggttctggttgaagtcccgatacggagggaattgaaacgatctcgtgttcccgtcccaccatgaccccgttctctccaaatagtagatcgtcaggctgactcgaggtgaccacccgggccctgtgttcggcggccgccgcggccgcgtccaacaggtccattaactccaaagtatcaggcgaccccgcgcgttggggtgtagagcgctgcatcggcggcgtatccatcgcactggggtgaatttagacgtacccgagttttccaaacgctctcgcagccttcaaaggattgcgattgcggttggtgagggagttccaacagtacttaaaacgtgttgtgcccccccctcgaccgcatatttcctccccgtgtcgtcaccgtgtaaatattcttaatgataagacgatgtagtgattggacgagactcgaggcgggaagttcatggaccatagtatgcgtttaaggagagaccgctggttggcgatgtacgcccggtgtctatttccgcataccttacaacatcataacaagggataccagacatgtgaatttcatttacatatgtttaaataacaaccaatcatcgtgtgtctacagacgatatataatatacataaacacaattggggttgtctcacatgcaaaacatcttatataacacgggttgtttccacccatccggcatctagttaatcaaatgcacgtcgacggtgtgtttgggtccctctccgtcgtcattacgttcgcgcaatcaacaagcgtatacaccaccacccctcccaacgattatgtcaggcggcacgaagcccgcgataacccataaaatacacacggggttgtggtgttcacgtaaccccccgccgatggggagggggcgcggtaccccgccgatggggagggggcgcggtaccccgccgatggggagggggcgcggtaccccgccgatggggagggggcgcggtaccccgccgatggggagggggcgcggtaccccgccgatgtttataaccataattctctaaaccgttgtagaaaatcacaaaaaaatttattcaaaaacaagtcgaagaacttcatatctgaggcatgtaaacccgttcgcacttcctggggtggaatggggtggggtgggggggtgaaaaagggggggggttaaattgggcgtccgcatgtctgtggtgtacgccaatcggatacactcttttgatctgcattcgcacttcccgttttttcactgtatgggttttcatgttttggcatgtgtccaaccaccgttcgcactttctttctatatatatatatatatatatatatatatatagagaaagagagagagtttcttgttcgcgcgtgttcccgcgatgtcgcggttttatggggtgtgggcgggcttttcacagaatatatatattccaaatggagcggcaggctttttaaaatcgatttgacgtgataaaaaaaaacacacggggcccccccctttttttggtgttataaaggcaacccaatcgaaggtctcccgccccggaatcccccattgccattttacccaagtagccttattcatagatgtaaacgtttgggtgtgtgttttgttgtgcagggttcgtccgattcataacgcgacagcgtcgagtcggttttaagggaaaaggttactacggccccaaggacatgttttgcacctcaccggctacgcggggcgactcgtccgagtcaaaacccggggcatcggttgatgttaacggaaagatggaatatggatctgcaccaggacccctgaacggccgggatacgtcgcggggccccggcgcgttttgtactccgggttgggagatccacccggccaggctcgttgaggacatcaaccgtgtttttttatgtattgcacagtcgtcgggacgcgtcacgcgagattcacgaagattgcggcgcatatgcctcgacttttatctaatgggtcgcaccagacagcgtcccacgttagcgtgctgggaggaattgttacagcttcaacccacccagacgcagtgcttacgcgctactttaatggaagtgtcccatcgaccccctcggggggaagacgggttcattgaggcgccgaatgttcctttgcataggagcgcactggaatgtgacgtatctgatgatggtggtgaagacgatagcgacgatgatgggtctacgccatcggatgtaattgaatttcgggattccgacgcggaatcatcggacggggaagactttatagtggaagaagaatcagaggagagcaccgattcttgtgaaccagacggggtacccggcgattgttatcgagacggggatgggtgcaacaccccgtccccaaagagaccccagcgtgccatcgagcgatacgcgggtgcagaaaccgcggaatatacagccgcgaaagcgctcaccgcgttgggcgaggggggtgtagattggaagcgacgtcgacacgaagccccgcgccggcatgatataccgcccccccatggcgtgtagtctttataaataaatacaatggtttggctcgtgtctttttttgatgtctgtctgtgggggagtggggtgttgtggatattagagggtagagggtgctggtttgaacgtctccattaacccacggggtccccacacgggccgtgtggtatgaatctctgcggatcccgcggtgagcacccgggcggtgaatatgccggactttactgcacacgacacgatacccccgcgcaccaggctctcatgaacgacgccgaacggtacttcgccgccgcgctatgcgccatatctaccgaggcctacgaggcttttatacacagcccctccgagagaccgtgcgcgagtttgtgggggagggcaaaggacgccttcggacggatgtgcggggagctcgcagcggatagacaacgtccaccctcggttccgccgatccgcagagcggtgttatcgttattacgcgagcaatgcatgccggatccacaatcgcatctggagctcagcgagcggctgatattgatggcatattggtgctgtttgggacacgccggacttccgactattggattgtcgcccgataataaatgcatccgcgccgaattatatgaccgccccgggggaatttgtcacaggctttttgacgcgtacctgggctgcgggtcccttggagtcccaagaacctacgagagatcctgacaccccatccctttatatagaaaaaaaaaataaatttaaaacatacaccggataaaagcgtactgttttttatttaaatttacacgctcggcgttgccccggttcggtgatcaccgggtcttatctatatacaccgtgtaactcgaacccccgtgactccctccaatcgcgttaccaaactcttcttccgtatccgtagattccgagtcctcgaaatcgtccactggaaggccagcgtaatacatgctttggttatacggggacttgtctaccctataggctttaaccctcattcgtttagccgtacagattaaaaatattacgagacataaaagtactactgctgcaagccctccggtccatgcggcatatcgtagaagtggtgacgttccggggtttacgggggtaatttccttgggtttagtagtcgccggtggctgaccggccgttggcggaaatccacgctcttcaattgcgtttacaaaatgatctactgtggatacaacagtgtatgctacggcttcaacatgcccgttaaaatacaccacaaaaacgtataatcccgacaaactctcgggtgtatctacaaactttaacgtggtgcccccgtcgtgtaagattagaccaaagctaggctccatatgagatattcccagacaatatgcggtgtagttatctgcatgttcacaattttgatacactgtgcttgcaacacgctgggctaaatgtggcgaggtaaatgtacaaccggaattcatatgagagaggcattggggtgcgttgggatgatacaaacacgtagaatataaccgcattggttgacatgtaggatcgatggggacatacaaccactctaacagcaaatcaaatggcgcttcatgtatcttatactgaagatgcattgccaagctaaacgtatcaccaactgaaaatacatgcgagtggtaattccacatatgaaactcagcccctcttggttgaggagttactgcgggcgtagggtttcttgttttttcatcccctttccaggtgaccaaaaacgtggcgtaggtagacgtaccatcggagccgcgcatgttccaaatgtacacacccaagtattgtttttctgtccgaagtactttcaagacacccggttcaatctcgggggggtctaattcgagttcatcaaacagtgtgctcgtgtttacaacaatccacggttggtccgcttccttcttaccttgaaaacggtaactgatttcggccaactgatcctctttagtattttccgcgcaatccacatccaccaccacgtcttgaaagcatgttgtatgttttaaacatatatgctggatggcgggcgctgcgtctcccgtacaggttaatgacggcaaaaagctccaagtctcggtgtaccggactccataaatccgctgaatcggtgcgcgtaaagtaaacgggtgattttcttccactgacacctcaatgagtctttggccttggggttttggattaagatctcctttaaacacgtcaccgtattgacgttggtccacatttacaattttatgtctgtcatcgccgtttaacgtagggataacgtggatgcccgtatcgtccccaagatcctcctgtgcagacatttgtgtgggttgcattaaccgttccccgctatcgataccacggccctgattatacaccccatggtgttcgtgtgcgttctctaaaaatccatcataatcattacgtggccatatataaggtgagttatgatcgtacgcttttcgcgaagactctccccgatttacccatgaagactccgcatgatctgaatggtagtaaggctcatatacggagtttgtatccagtttgtcttcatcggtgtgaaaatcatcgtatcgcaagacggatgctctgaccggattcgttatacgcaacgttcccgtgataattccgaaccccatcaatacccccaccacaggtttattaactgtccccatattacaggcgaccctcggaatatagtcacttaaaaccacgcaattcgcccgaggtctaaaaccatggactgctctcgtgtataccagctcggcctttaaggcttcataaaacatccccgcccaaatgtgggcgtgttaacttatagttaggagattcttaatccttcccctcatatcacaacgcgtaatcaaaacgctaaataaaacgcatatagtttatttaatataaaatccgggataattagttctatttaacaaacgggtttacaacggaatgtgggggggattcttcgcgaatcgttgctagttgtgcaatggcggcctccaacatcacatcggattctggtgtcgcattttgtatgccccttcttgtttttgtatttgggcgataaattggatgttttttaattctacgtcgcttaacgcttattacaataacaataaccatggcggtgaggatcatgacagacgctactataggaataattataagtagattttctggaggatcattaagggacttttcgggtaacgtggacatatccgttggatatacgtgattttctatcccctccttaacaacggacttagtttctgtcgtaacaacgtcctcatgtaaccaagggttatcctctaacgatttaccggcacgaagatcaagcatatgttgaaacagggaggtaccggaccctttgggtgtcgcgggtaaatcacacaaacgagcttgttgaaaaagggctcttgtagaatatccattctgtagagacggagaagtgtagataaccccgtgaatgttgtgatgcgagcccgctgtatatacatttacaccaagaatgaaaccatcggtggatctgctatggtctaaccgaacaagaagtacatacacaccagcatcatttattcccggtttggtaattttcaacattacaccagcatccggctctgttgatatccgatccgttgagttaccataatgccacgaatgtttgtacctacacgaaataaaagcgctcgttctaatccggggacatccgtcgtatcttattacttgtactgaccggaaacaaaacgccaccgtatccgcgtataacagttccagtgttccgctatagtttgtcccggtaggtagttgctctccaataaagacaagctgtccttttatctctgtataattatcattttgcatgggaataaggatagacgtgagactgctgttaacttgcaagctcacgtggtcgcccttgaagatcaaagcgttggtcacttgtatgtaaaatataacggccgatatcaaacattggattaaaaacatcgcgattaaatgaggcgcaccagtatacccaactacaccgaagagcagctctgtgagccgggggaggggacgcttttcagcgctactacaatgttaagaaaatgatcccgtgttttatccttgttgtaatggggcgtgactctgtattaagtttctattggttatgttatttatattagtatttcaaaacattgcgcgtttgtaccctatttgccttaacgggttatacgttataaacacaatttatacaatattttattaacaggcttaatgaattttaatctccaacttccattggatttggatatggatcgggaagagtttggaaaacagagtggttaagcaacacctctgctgatggtcgatgacgtgcgtcaaacgataacatcttacatatcaaatactccaaatcaattggcaactcatatagatttgtccacaatggcctggatccgggttttcgagaagaccgttttgccaaaccaatgtattgtcgacgaagatttgatgtagggttaatgggaaattcattgggatgagttccagatcgtcgtataataagtttaatttgacgctcactgtcacaattgccatctaaaccgtctcgttcaaataacgagttctgtcctgtagccatttcaaataatacaatcccggcactccatatgtccacggcaggtccatatggatctctagccaataactcaggagagtttgtggcgattgttccagcccagccataatacctgttggcattaatatccacggggaaacacgctgctccaaagtctcccacacaaacatcacctgggtggttaataaatatattttcagattttatatcacggtgaataatactgttattatgaagatactgtaacgcgcgtaatacagatcgctgaattgctaaaatgtcacatatggggaggttgcgctttgcagctagatagcagtataaatctgttcggtaacgtggtaatataagacatgtcattttgttatacgtaaacgttcctttaagctgtacaacggatgggtgggttaacgctcttaacacggttgcctcggtggccgttccttgacgttgacccgctttaatgaccacatgttcacatgttttactgtccatacacgcaaacgcaaaaccttccgcccctggtgtaaacgtttttaatattacaaatcccgctttattaattccaacgcgtgcttctgcgcacaatgccacagaggcttcggcttcagtttcgtgtacaccatcaaatatattaaaagactgtatatccatgttaacgtcataattgggatcatcctcagattctatgccgggcgacatttcaactggaaacatctgttgtataaacccacatgtttgcataatatgtgacggtgatgttgagatggcgccacggaactttccttgtccaacaaaggtgtctgttgcatcaacgtcgttcattatacttgtataccccgacttatgttgatagtgttaatgaaccaaaaacctgttgtccaacaactgtacaaaatatactcaccgacacacttataaagtgatccgattataagagggcggagataatgacaaaaaggggaggggttaaacataacttacaaatatggatttgattgttcctaggattattaataatgtctacatgttttatttaataataacgtaaggtaactttacctctttgtgagaatgtcggtatagctgacaacgtttatgaaaacgcgctttaaacgacctattgatgaataatctagaatcttgcatgtatataaatatcaaaaggtgtggtattaaacacttttaaactagcctgctggccttacaatctggatttctatggccggacaaaacaccatggagggtgaggccgtggccttactgatggaagcggtggtaaccccgcgagcgcaaccaaataatacaacgataacagccatacaaccgagccgttcggctgaaaagtgttattatagtgatagcgaaaatgaaacggcagatgaatttttgcgtcgaattggaaaatatcaacataaaatatatcatcgtaaaaaattctgttatattacgctaataattgtctttgtatttgctatgacgggagcggcctttgccttgggatatataacgtcacaatttgttggataagtggacgatttcgaggactcggaatctacggatacggaagaagagtttggtaacgcgattggagggagtcacgggggttcgagttacacggtgtatatagataagacccggtgatcaccgaaccggggcaacgccgagcgtgtaaatttaaataaaaaacagtacgcttttatccggtgtatgttttaaatttattttttttttctatataaagggatggggtgtcaggatctctcgtaggttcttgggactccaagggacccgcagcccaggtacgcgtcaaaaagcctgtgacaaattcccccggggcggtcatataattcggcgcggatgcatttattatcgggcgacaatccaatagtcggaagtccggcgtgtcccaaacagcaccaatatgccatcaatatcagccgctcgctgagctccagatgcgattgtggatccggcatgcattgctcgcgtaataacgataacaccgctctgcggatcggcggaaccgagggtggacgttgtctatccgctgcgagctccccgcacatccgtccgaaggcgtcctttgccctcccccacaaactcgcgcacggtctctcggaggggctgtgtataaaagcctcgtaggcctcggtagatatggcgcatagcgcggcggcgaagtaccgttcggcgtcgttcatgagagcctggtgcgcgggggtatcgtgtcgtgtgcagtaaagtccggcatattcaccgcccgggtgctcaccgcgggatccgcagagattcataccacacggcccgtgtggggaccccgtgggttaatggagacgttcaaaccagcaccctctaccctctaatatccacaacaccccactcccccacagacagacatcaaaaaaagacacgagccaaaccattgtatttatttataaagactacacgccatgggggggcggtatatcatgccggcgcggggcttcgtgtcgacgtcgcttccaatctacacccccctcgcccaacgcggtgagcgctttcgcggctgtatattccgcggtttctgcacccgcgtatcgctcgatggcacgctggggtctctttggggacggggtgttgcacccatccccgtctcgataacaatcgccgggtaccccgtctggttcacaagaatcggtgctctcctctgattcttcttccactataaagtcttccccgtccgatgattccgcgtcggaatcccgaaattcaattacatccgatggcgtagacccatcatcgtcgctatcgtcttcaccaccatcatcagatacgtcacattccagtgcgctcctatgcaaaggaacattcggcgcctcaatgaacccgtcttccccccgagggggtcgatgggacacttccattaaagtagcgcgtaagcactgcgtctgggtgggttgaagctgtaacaattcctcccagcacgctaacgtgggacgctgtctggtgcgacccattagataaaagtcgaggcatatgcgccgcaatcttcgtgaatctcgcgtgacgcgtcccgacgactgtgcaatacataaaaaaacacggttgatgtcctcaacgagcctggccgggtggatctcccaacccggagtacaaaacgcgccggggccccgcgacgtatcccggccgttcaggggtcctggtgcagatccatattccatctttccgttaacatcaaccgatgccccgggttttgactcggacgagtcgccccgcgtagccggtgaggtgcaaaacatgtccttggggccgtagtaaccttttcccttaaaaccgactcgacgctgtcgcgttatgaatcggacgaaccctgcacaacaaaacacacacccaaacgtttacatctatgaataaggctacttgggtaaaatggcaatgggggattccggggcgggagaccttcgattgggttgcctttataacaccaaaaaaaggggggggccccgtgtgtttttttttatcacgtcaaatcgattttaaaaagcctgccgctccatttggaatatatatattctgtgaaaagcccgcccacaccccataaaaccgcgacatcgcgggaacacgcgcgaacaagaaactctctctctttctctatatatatatatatatatatatatatatatagaaagaaagtgcgaacggtggttggacacatgccaaaacatgaaaacccatacagtgaaaaaacgggaagtgcgaatgcagatcaaaagagtgtatccgattggcgtacaccacagacatgcggacgcccaatttaaccccccccctttttcacccccccaccccaccccattccaccccaggaagtgcgaacgggtttacatgcctcagatatgaagttcttcgacttgtttttgaataaatttttttgtgattttctacaacggtttagagaattatggttataaacatcggcggggtaccgcgccccctccccatcggcggggtaccgcgccccctccccatcggcggggtaccgcgccccctccccatcggcggggtaccgcgccccctccccatcggcggggtaccgcgccccctccccatcggcggggggttacgtgaacaccacaaccccgtgtgtattttatgggttatcgcgggcttcgtgccgcctgacataatcgttgggaggggtggtggtgtatacgcttgttgattgcgcgaacgtaatgacgacggagagggacccaaacacaccgtcgacgtgcatttgattaactagatgccggatgggtggaaacaacccgtgttatataagatgttttgcatgtgagacaaccccaattgtgtttatgtatattatatatcgtctgtagacacacgatgattggttgttatttaaacatatgtaaatgaaattcacatgtctggtatcccttgttatgatgttgtaaggtatgcggaaatagacaccgggcgtacatcgccaaccagcggtctctccttaaacgcatactatggtccatgaacttcccgcctcgagtctcgtccaatcactacatcgtcttatcattaagaatatttacacggtgacgacacggggaggaaatatgcggtcgaggggggggcacaacacgttttaagtactgttggaactccctcaccaaccgcaatcgcaatcctttgaaggctgcgagagcgtttggaaaactcgggtacgtctaaattcaccccagtgcgatggatacgccgccgatgcagcgctctacaccccaacgcgcggggtcgcctgatactttggagttaatggacctgttggacgcggccgcggcggccgccgaacacagggcccgggtggtcacctcgagtcagcctgacgatctactatttggagagaacggggtcatggtgggacgggaacacgagatcgtttcaattccctccgtatcgggacttcaaccagaacccagaacggaagatgttggcgaagagctaacacaagacgactacgtatgcgaggacggtcaggatctaatgggctcgcctgtaatcccgctggccgaggtcttccacacccgattctcggaggccggcgcgcgagaaccaacaggagccgatcgctcccttgagacagtctctctcggaacgaagcttgctaggtctccaaaaccaccgatgaacgatggggaaacgggcagaggtacgacccctccgttcccgcaggccttctcccctgtatcccccgcgtctcctgttggagacgccgccgggaacgatcaacgggaagaccagcggtctataccccgacaaacgacgagaggaaattcaccaggtttgccgtcggtggtccatcgagacagacaaactcagtccatctcgggtaaaaagccgggcgatgagcaagcgggtcatgcgcatgcatcgggggacggagtagttctccagaaaactcaacggcccgctcagggaaagagcccgaagaaaaagactttgaaggttaaggtcccactcccggcgcggaaacccggtggacctgtacccggcccggttgagcaattgtaccacgtcctttcggacagcgttcccgctaagggggcaaaggcggacctgccgtttgagaccgatgatacccgcccaaggaaacatgatgcccggggtataacacctcgcgtccctggacgttcgtcggggggcaaacctagagcgtttttggccctgccgggaagatcccacgcaccagacccgattgaggatgacagcccagtggagaaaaagccaaagagtcgtgagtttgtttcgtcttcatcctcttcctcgtcgtggggatcgtcatcggaggatgaagacgatgaaccccggcgcgtttcggtgggaagtgaaactacaggcagcaggtccggacgcgaacacgccccttccccgtcaaattcggatgattcggactcaaatgatggtgggtcgacgaaacaaaatatccaaccgggatatcgatccatcagcggtcccgatccgaggattcgtaagaccaaacgtcttgcgggggaaccggggcgccagagacagaaatcattttccctgccgcgatccagaaccccgataattcccccggtgtcggggccgctcatgatgcccgacggaagcccttggcccggatcggcacccctcccatccaacagggtgcggtttggaccgtccggggagaccagagagggtcactgggaggatgaggctgtgagagcggcgcgggctcgttacgaggcctcaacggaacccgtgccgctttacgtgccggagttgggagatccggctagacagtaccgcgcgctgattaacctgatctactgtccagacagagaccctatagcatggctccagaaccccaagctgaccggtgtcaactcggccctgaaccagttctaccaaaagctgttgccaccgggacgggcgggtaccgccgttacggggagcgtagcgtctcccgttccgcatgtaggcgaagccatggccacgggggaggccctctgggctctcccccacgcggccgcggccgtggctatgagccgtcgatacgaccgggcccaaaaacactttatcctacagagtctccgcagagcctttgccagcatggcataccccgaggcaacgggctccagtccggcggcgcggatctcccgcggtcacccttctccaacaaccccggccacacaggctcccgaccctcagccgtcggccgccgcacgctctctttctgtgtgtccaccggatgatcgtttacgaactccgcgcaagcgcaagtcccagccagtcgagagcagaagcctcctcgacaagattagggagacacccgtcgcggacgcccgggttgcagacgatcatgtggtttccaaggccaagaggcgggtatccgagcccgtgaccatcacctcgggccctgtggtggatccccccgccgtaataacgatgccacttgacggaccggccccaaacgggggatttcggcgtattccccggggggccctgcataccccggtcccgtcggaccaggctcgcaaggcgtactgtacccccgaaaccatcgcccgtctggtcgacgacccattgtttcccacggcctggcgccctgcgctaagctttgatcccggcgccttggcggaaatcgccgctcggcgtccgggcggaggagaccgacggtttggtccacccagcggagtggaggcgctgcgacggaggtgcgcctggatgcggcagatcccagacccggaggatgtgaggcttctgatcatctacgatccgttgcccggagaggacatcaacggccccctcgagagcaccctcgcgacagatccgggaccgtcatggagtccatcccgagggggactgtctgtggtcctggcagccctgagtaaccggttgtgcctgccgagcactcatgcctgggccgggaactggaccggcccgccggacgtgtccgctttgaacgcccggggcgttttattactgtcgacccgagacctggcctttgccggggccgtcgagtatctaggctcgcggttggcctctgcccggcgccggttgctggtgttggacgcggtggccctcgagaggtggcccagggatggacccgctttgtctcagtatcacgtgtacgtccgggccccggcgcgaccggacgcccaggccgtcgtccgatggccagactcggcggtcacagaaggactcgcccgggccgtgtttgcatcgtcgcgcacctttgggccagcgagttttgctcgtatcgagactgcgtttgccaacctgtacccgggcgaacaacccctgtgtttgtgccgcggtgggaacgtcgcatacaccgtgtgtacccgcgcgggccccaagacccgcgtccccctgtcgccccgtgaataccggcagtacgtgctgccgggttttgacggttgcaaggacctcgcgcgacagtctcggggtctggggctcggggcagccgactttgtggacgaggcggcacatagccaccgcgcagcaaaccgatggggcctgggtgccgcgcttcgacccgtcttccttcccgagggacggagaccgggggccgccgggccggaggccggcgacgtacccacctgggcgagggtgttttgccgccacgccctgctggaacccgaccctgccgcagaaccactcgtgcttccacccgtggccggtcggtcggtggcgctgtatgcgtcggcggacgaggctcggaatgccctccccccgattcccagagtaatgtggccgcccggttttggggccgcggagacggtgttggaggggagcgacggaacacggttcgtgttcggacaccacgggggctcggaacggccgtcagaaacccaggcggggcgacagcggcgcaccgcagacgacagagaacacgctttggagctggacgattgggaggtggggtgtgaagacgcgtgggacagcgaggaggggggcggggacgacggggacgcaccggggtcatcctttggggtgagcatcgtgtcggtggccccgggtgtgctgcgagaccgccgggtgggtttgcgcccggcggtcaaggtggagctgttgtcctcgtcctcgtcctccgaggacgaggacgatgtgtggggagggcgcggggggaggagccccccgcagagtcgggggtgacggagtcccctccttttctcgtgagcgccactggcgcgcggactgtttgttgttaataaaagcggaacggtttttatgaaaaaagtgtctgtctgtctgtgcgggcgggcgacgggcgggctggtcggacccccccccgaaaataacccccccccggtttctgggcgcccggcggaccccgggagaggaggccagccctctcgcggccccctcgagagagaaaaaaaaaagcgaccccacctccccgcgcgtttgcggggcgaccatcgggggggacttgcattaccctatcccagtattgtttgtacgcctctaatggagtaactgtcccaatacacccgacttcctatatacagtgcttttgtttgtggacttacctttatttacgggtattacaggggggtggagaaatgtcttcgtatcgctctttatctaaataaagacagaatctaaaatgtcacttagctgtatacccggcccaaggttataccaatcaacttccctgtttgttgggactgtccgcctaccccaatacacattttatacccacgttttagtgggtgggacttaaaagaaatgggtggagggatataggggtgtgtcttcgttggtaccaattataaaaatgtactcgccacaactcacaatttagaacgcatggcagttctgctacgtgtttggatgcccggacattagaatacagccagttgttaccatggataccatattagcgggcggtagcggcacctccgacgcttcggataatacctgcaccatatgcatgagcaccgtttccgatctcggaaaaaccatgccgtgtttgcacgacttctgctttgtttgtattcgggcatggacctccaccagcgtccagtgtcctctctgccggtgtccagtgcaatccatcctgcataagatcgtaagtgatacaagttacaaggaatatgaagtgcacccatccgacgacgatggtttttctgagccgtcatttgaagattccatcgacatcctaccgggagatgtcatagatcttctgccaccaagcccaggaccgagtcgggagtccatccaacagccaacatcaagatcgagtcgggagcccattcaatcaccaaaccctgggccccttcaatcgtcggctagagagcccacagcagagtcaccaagtgactctcaacaggattctatacaaccaccgacccgagactcgagccctggtgtaaccaaaacatgctctaccgcatcatttttacggaaggtattttttaaagaccaacctgctgttcgatcggcgaccccggtggtgtatggctcgattgaatctgcacagcaaccccggaccggggggcaggactaccgtgatcgtccagtatctgtgggaattaatcaagacccacgaaccatggacagactgccttttcgagccacggatagaggaacagagggaaacgcgagattcccgtgttacatgcaacctttactcggatggcttgatgatcaacttgcggaactgtatcaacccgaaattgtagagcctacaaaaatgttgatattaaactatataggtatttacgggcgtgatgaggcgggattaaaaacatccctgcgttgtcttttgcatgattcaacaggaccgtttgtaacaaacatgttattcttgttggatcgatgtaccgatccaacccgcctaaccatgcaaacctggacctggaaagatacagccatccaactaattacaggtccaattgtaagaccagaaaccacctcaaccggggagacctctcgtggcgatgaaagggatacccgattggtaaatacaccccaaaaagtcaggcttttttctgtgttaccggggattaaaccgggaagcgcaaggggtgctaagcgccgtttatttcataccggcagagacgttaaacgatgcttaacaatagacctgacatctgagtctgattcggcatgtaagggaagtaaaacccgcaaagttgcctctccacagggggagtccaataccccctccacctccggatcaacatcaggttcactgaaacaccttaccaaaaaaagctctgccggtaaagcgggtaaaggtattccaaacaagatgaagaagtcctagtttgttgggagggggaaggaaatgccttaaacatccacagtctgctttattaccaactgtatgtaaattatgatcattaaacgtgcattttaaaaatacctgagtgttgctattggtcgtaagggttggtatatctggaacccaaggtgtaaatactgccccctggtaagtccgtacacgattcggaatgcccgcaatccggtctcggagtaaccggggcatcctgctctgcaaatacaataaacataacagtctaacagtacgcatgtgctgtcgtaagcgctccgccctaaattacaaaaatttgagattacgctcaatacttgtcaccgtttgtatttatacacctctacgggagcaaactaaaggtatacttggagatgcaaccaaggccgagttgagacgggaaaattagaagctgtttttccagcggcaaaaatcatccggtttgggtatgtcttatagcaattaaagttattaaaatggccggaaggtggcgggggtggtgaaggcgagggtaaagcaaacttgcggggggataaaaggcatatatgttacaaaatacgcacgcaaatataaattttagttttgtacttacagtaaaggcaacggtgttttcggtttaggcagccggacccgtttaaaatgccaactggatagtctgcaaggaggaaacgctgctgcaatgagtcaggtttttaggtgaattaggtatgatgcatcatttttgttaatggacttttaatggattgaaacggatagaaggaaacgtgtagcataatggatattggttgatattttaagcacgctgccaagtacgcactaagaatgcttagaaatatttaaactgaaatgcgtgggtttggcaaacgttaccgtaaatcaatctcagatccaagggataatggccgttgggcaggcctccaaaaggcaatttgagcgttttaagtttggggtacgtttttaaagcttgattggcaaacgttaccgcaaatcaatcttagatccaagggataatggccgttgggcaggcctccaaaaggcaatttgagcgttttcagtccgcttgaaaacggtctaagtatttgccgtaaatgaccgcgagaggtataatataaacatctgttttcccgatgacgtgttaagaaaagtgattatatcagataacgggggactgtaaagcttaatacgtgacatgtgattgggtgtataaatactacatccaaatcttgcatggaaattcgctttgtcggcacgccgtgacgtttgacatattaagatcgccctttttaggaaaatgagatatgacaccaagagtttaactaaaggccaactgtatatataaaactcatacttgtccatgcttccattagagtggtcaagtttttcaaaggatacgacaacgtcgtagtgaagggaaaacacaagcgtcatggcatcacataaatggttactgcagatagtttttttaaaaactatcacaatcgcgtattgtcttcatctccaagacgacactccgttgttttttggagccaaaccgctatcggatgtgagtttgattataacggaaccgtgcgtgtcatcggtatatgaggcgtgggactatgcggcacccccggtatcaaacctcagcgaggcgctatcgggaatcgtggttaagacaaaatgtccagtaccggaagttatactttggtttaaagacaaacaaatggcgtactggacaaatccatacgtcaccttaaaggggctggcacaatctgttggtgaagaacataaaagcggggacatacgcgatgctttgttggatgccctttccggtgtatgggtagactctactccatcttccacaaatatcccggaaaatggatgtgtctggggagccgaccgtttgttccaacgcgtatgccaatgaaatgaaactatcggattcaaaggacatttatgttttggcccatccggttaccaaaaaaacccgcaagcgaccccgcgggctgcctttgggggttaagctagaccccccaaccttcaagttaaataacatgtcacatcattacgacacggaaacgttcacccccgtctcttcgcaactggattcggttgaagttttcagcaagtttaacatttcccctgagtggtatgacctgttgtcggacgaacttaaagagccgtacgcgaaaggtatttttttagaatacaatcgtcttttaaattcaggggaagaaatacttccatctacaggcgatatttttgcatggacgcgattttgcggaccccagagcattcgcgttgtaattattggtcaagatccataccctaccgcgggacatgcacatgggctagcgtttagtgtaaaacgtggcataacaccaccgtctagtcttaaaaatatttttgcggccctcatggaatcatacccaaatatgactccgcccactcacggatgcctggagagttgggcaaggcagggggtgttattgctgaataccacgcttacggttcgtcgcgggactccggggtcgcatgtatacttaggctgggggcggctggtgcaacgcgtgctacagaggttatgcgagaaccgtacagggttagtttttatgctgtggggtgcgcatgcacagaagacaacccaaccgaattcaagatgtcatctggtgctaacacacgcgcatccgtcgccattgtcccgtgttccatttcggaattgtcgacatttcgttcaagccaatgagtattttacgcgtaaaggcgaacccgagatcgattggagtgttatataacactccaatcgaccctcttgcgtaccataatgttttcggagttgcctccttccgtaccgacggcattgcttcaatggggttggggattgcatcgtggaccgtgttcgatcccaaattttaaacaggtagccagccaacacagtgttcagaacgattttacagaaaatagcgttgatgcaaatgaaaaatttccgattgggcacgcgggctgtattgagaaaaccaaagacgactatgtaccatttgatacgttgttcatggtatcatctattgacgaacttgggcggagacaattaaccgacaccatccgccgcagcttggttatgaacgcctgtgaaataacggtcgcgtgtacgaaaaccgcagccttttctggtcgaggcgtgtcacgacaaaaacacgtgaccctatctaaaaataaattcaatccatccagtcataagagcctgcaaatgtttgtgttgtgtcaaaaaacccatgcaccccgtgtcagaaacctactgtacgagagtattcgtgcaagaagacctcgccgatattacacccgctcaacggacggaaaatcgcgtccgttggtaccagtgtttgtgtatgagtttacggctttagatcgtgtccttttacataaggaaaatactttgaccgaccaaccaattaatactgaaaatagcggtcatggacgtacgagaacgtaatgtgtttggaaatgccagcgttgccacgccgggggaacatcagaaatttgtacgcgagttaattttgtcgggacacaacaacgtcgtattacagacatacactggtaaatggtcagactgccgtaaacacggtaaatcggttatgtataataccggtgaagcgcggcacccaacctgcaaggctcatcaacgttaagaggataggtgtcttcaaattaaaagccgttaaatataaattttttgtgtcgtttattcgcgtatgaaatgtaatcagttgggataaatgttagtcttgaatctgtctttacgcgtttgcggcgtcccgtaatattaacgaaagaacgtcgtcgtctgatgtgaaaaaggccggttgtggtgaagaaggacagttggtttcaggctgccgcctttgcgatgtatactggtgcggggttggtgttggtgtggtctgatcgtcaggtctgtttacccgtaaaccgtatataacaattgagatacacatggataggtcatcttccgttattacggatagtaccccccccacattactgtacagctgagatgttgggtcagaaccgacccaggacataaacggcatcgcaaatgttgcgtggggtttgtcctgtaagtggaaatcccggtgcgtaaatgcgtatgatgaaaagtcagtagaacagtctatggttagcagggtcactgtatgggtgtgttgaaggacgatcataccaccgctcattgtatcacatcgagcgtccgtcttcaccgccattgatcttgacccacccgtaaatgcgtagagtgtttgttcatgatccggtaaagtccagtgaagaacccgcctaaccccatgtaacctatataaaataaacgtcgttgggggtccagagatgctcatggcgggtgtatttaagacaaaacctagaaatgagaacagcaagcccgcatgcgtgtttttatacaatgctttaatacacaacgtgtacgttgggatcacgtagagcggcaagaatgtgatcgctaatttctgcggatttttcatatcgttcccgtagagggtttagattcatttttaagaacctagaggagaccgtacgcgacatggcaacatacacactatttaggcgcagtttatccgccgtaaaacagatagctaccttctctaaactcagaccctgtgagcgtgcaattgtcatggctagtttagaactaaggccatagtccaccgtggtggccattgccaattctgcatcctctatagactcggtaaattcacatacgttagcgtttacgatggacacaaacccatgttgatcctgtaagaccataagaggtacgtgtagagcatataacatttcggtagtttcgcggtacagcttttttcgggtcagttcctctacaaagactggcacgggtgcaaaagtataccccaaaagggtatacgtatctgtttgtaatgccaaagataacagccccccccgcacattgccgatcaaaagctcgcttccgttgaaattaacattatcgacatacgcgctaaagggggcggttgtaaagctgctttcgaaaagctctgctaatatggcatatcgaccatcgtaaatagctttcattaacagaaactgagcatggacctcattggatgatttgggataggaaaattcgtactggcagtataccaagtcaataacctcgtcgttaagtgccgtaaaaattacatcatccgggtcttcgggtatggaggccgttactttggactcgggggctttggtaaagcagaaggctttatcggcagaagtagctgcaccatcacagtcaatcccggcacccgccccattaaccgctgcttcgtgtaagggggctttgtttgttccagacaataactccagggttaaggcagctaaccgtttgtatgctaacgataccttatcgggatgtaggtttttatttaacaaaaaattgtaaaagttaatcaagcctccaaagattaggtttgacagaaaccggtaagcatattcgatggatgtctctcctcgagccttcacaaaggagtcgtcacgtaaaacctttgcaaacgattgaaatgtaccactgaatccaataactaacttacgtagtcttgtggttacaactacgagactatttagcacgtaagtgatgtctgtacgggctacaattaagtcgcgatttgaatgtgtttcgtatttaactgttcccatgtcatgatctcggctttgggaataattgtgcaaacgaccggagtttgcccgtatccaatgttcaacagaaagtccgggttgtcccgttaatttgcggtattcatcaaatgccgttagccggatgaatgtataagtcggtaaggcaaacacagaaaaatggtcatttttcgatagttttaaatgcgcgtgtaacttactcatatacgcgctcacctccttatgcgacgaatacagacgcgtccatccgggaagattagcaggattgttaatataggatgcaggtacaacaaatgtatcgaccagacgcgcatgtgcttcggtaataggtagcccgtactcaagcgtttttaaaagatttccaaaatcgtcctcttgacatcgtttgttattaataaagattgcccagttatgtgagatgttagtatattgacgcagagtttgattgcagattatatacgtgagtatattttcactaggagttacgtgtgaacgctgcatgtcatgttgaaaatgagattctaacgagtcagtttgggtgggcgaaccgacgcatactatgaccggttttcgaccgtttatgtactgagggctttgatatatagcattcaaaagccaccaacagtaaacaacggccgtgagaatatgacgccctagcaatcctgcttcatcaataacaataacgttgctccgggtaaaagccggaagggaaccgcatgcgataaacgcggttccggacattgagcctgtaggtttattaagcaaacgttcaattgcccacagggttttaaatgtcgatgttcctccgcgaccgtcgtcccccatttgaaacactcgttttgttatatcaattaaaacttcccagtagtatacaatatctcttttttgcaggtcctcaatagaagggggggtcgtagtccagttatatgcgtaacggcccagctgagcctgaatgtgatttccgcgaaaaccaaattcatgaaagattgtgtttatcggacgactcgcataagccgttgataacttagcatgaacattttgggcagcaaccctggtggatccggtaataatgcaatcgatagcttcgttaagcgtttggatacacgtgctttttccggagccggcatttccgctaattaaataaacggagaaggggagctcattcctctgcatttcaggaggcgcttgcagttcgagtaactgtttaaaccaacacaaccgcggaacacgttcttttggaatcgtaattgcggcaagttctcgaatccgtgagaggataggttgaatgctatgcatagaggtgaagtttaaatatacactgtcatcaaatccattgggcgtctctggattaaaaacgtttttgggtgaagaactgtctacagaaattgatcttttcatcgtggttttcaatggccgaaataacgtctctttttaataacagttccggtagtgaagaaaaaaggatagcaagttctgtttctattgaccagggcttgaatggaagtaacccaaatgaccaatacaagaacatgttcgatatatactggaatgagtacgccccggatatagggttttgtacatttccggaggaagatggctggatgttaatacacccaaccacgcaaagtatgttgtttcgaaaaatcctagccggtgactttggatataccgatggacaaggcatatatagcgctgtacggtctacggaaactgtaattcgccaagttcaggcaaccgttttgatgaacgcgttggatgcaactcggtatgaggacctagcagcagattgggaacaccacatccaacaatgtaacctgcatgccggggctctagcggaacgttatgggctatgtggagaatcagaagccgtacggcttgcacatcaggtttttgaaacctggcgtcaaacattacagtcatcgttacttgagtttctgcgtggaataaccggttgtctctataccagtggtttaaatggaagggtcggttttgccaaatacgtggactggatagcctgtgtaggtattgtgcccgttgtaagaaaggtacgatcagaacagaatggaacccctgcaccattaaatacgtatatgggtcaagcggcagaactgtcccagatgttaaaagttgccgatgcaacgttggccagaggagcggcggttgtcacaagcctagttgagtgtatgcaaaatgttgctattatggattatgataggacgcgtctttattataattataaccgaagattaattatggcaaaggatgatgtaacgggcatgaagggagagtgtttggtcgtgtggccgcccgttgtatgtggggagggtgtagtatttgactcacccttacagcggctttctggggaggtgttggcctgttatgcattacgtgaacatgctcgcgtctgccaagttttaaatacagcccctttgcgcgtgttaataggtcgccggaatgaagatgatagatctcacagcacacgtgcggttgatcgtataatgggcgagaacgatacaacacgggctggatcggccgcgtctagacttgtaaagctaatagttaacttaaaaaacatgagacatgttggagatattaccgaaaccgtacgttcctatctagaagaaacgggcaatcacattctggaaggaagtggatcggtggacacatcacaaccggggtttggcaaggccaaccaatcctttaacgggggggcaatgtccggaacaacaaacgttcaaagtgcgtttaaaacttcggtggttaacagtatcaacggcatgctcgagggttatgtgaataatttattcaaaaccattgagggtctcaaggatgtgaacagcgatctgaccgaaaggctccagttcaaagaaggagagctgaaacggttacgggaagagagggtaaaaataaagccatctaaagggtcacatattacaatggcagaagaaacacgtattgccgatttaaatcacgaggttatagatcttaccggcataataggggatgatgcatatattgccaatagttttcaatctcgttatatccccccttatggagatgatataaaacgtttgtctgagctatggaaacaggaacttgttcgctgttttaagcttcaccgggtaaacaataatcaaggccaggaaatttctgtatcatattcaaatgcgtcaatctcattactagttgcgccgtatttttcattcatattacgggccacccgattaggattcttggtaactcaaagcgaggtacataggtcagaggaagagttatgccaggctatttttaaaaaggcgagaacagagtcctatttatcccaaatccgaatattatatgaaatgcaggttcgcgcagaggtaataaaacggggcccacggagaacaccaagtccttcctggggtttgcctgaccctacagaagatgacgaaagaatcccggaacccaataaaataaataaccaatacatgcatgttggatataaaaacctatcccattttatgaaaggacacccccctgagaggttacgggtacacaaggtaaatgcagcggattcgaccttactggataaaattcgagcaaaccggaggcgcggggatggccgatgggatgtccggaataaatatacccagcattttaggttgcagcgtaacgatcgacaacttactaacacgagccgaagaggggttggatgtgagcgacgtgatcgaagatcttagaatacaagcaataccaagattcgtatgcgaggcgcgggaggtaaccggtttgaagccacgctttttggcaaactctgttgtatcactgcgcgtaaaaccggaacaccaagagaccgttttagtagtgttgaatggtgattcaagtgaggtgtcctgtgatcgttactacatggagtgtgttactcaaccagcgttccgcggatttattttttccgtattaactgcggttgaagatagggtgtatacggtgggggtgcctccgcgcctgttaatctatcggatgactctattccgcccggataatgtcctagattttaccttatgtgttattttaatgtatctggaaggcattgggccctccggggcatctccatcgctgtttgtacaattgtctgtatatcttagacgcgttgagtgtcaaataggacctttggaaaaaatgcgtcggtttttatatgagggagttttatggttgttaaacactctaatgtatgtcgttgataacaacccctttacaaaaacccgcgtattgccgcattatatgtttgttaagttactgaaccctcagcctggaacggcccccaatattataaaggctatatattcatgtggggtgggtcagcgttttgacctgccccacggaacccccccctgtccagatggtgtggtgcaagtacccccgggattgttaaatggacctttacgagattcggaatatcagaagagcgtatatttttggtggttaaatcgcaccatggtaacaccgaaaaatgttcagttatttgaaacgtataaaaattcaccacgggttgtaaagtaaataaaccttttattttaaggatgggttgttgcggcgtgtttttttgtcataaaaacaagaagttatatgaagcaaggggatcgtcagtaaatttcaatgatggacttgaaaaatcattatgagcatctagaagatggttaataatagtgacaaacgtgtgtataaggggcttgagatgagcagcgcagtctatggggggaatacaggcacacgatggtagcaattcccagtaaacaacagtaggaggtccatgtgggttgggattacgaaccataattatctgtcttggtttataatccttatcttgcatgtgtccgtatgtcagataagatgccggtattgcttttgtttccgaattttgctcctgaagactccagtataccggagtataacggcgatcaaaaacatgttcaaaaaaatcgacgtatgtttttctggcagcctccacaacttgtccggcccatatgtcgtataggacatggtcccatatgcaattttcctgtatccgttctcgaatttttgttgcggtacataggagtcctgaaagacgctcctttaaatctcgcgccgcctgacttcgccatggcacgccaactaaatccggaggcgtgtttgtttgtaaattccacagccagcttcccgtggtacaccaggtaaatgcgtgagtgtacacaccctcgacccggagtaccggttccatggcgggtgtaaagttaagacctagttgaattcgtaataagcccgtgactgctctttcgcaggtggccgctaaatttaaggccgaacaacgtgcctgatctgaacatacattgcgcgtatgtaaatcggtgaagattccccaaaatccatcttttatataagtacatatagcaaagccctgttccaaggccgtttgttcgacgcaaaggctaatttcattggctataaaaataatagctttgtatatactcgggagtatgtgccgtaaccccccaaaaaaagacaccaacgcgggttttaggcaccccattcctcgacgcattctagccaggacgattttgcctaatctaaaatgcatggggaacatagcgcagtatatcgtgggaaaaaaggcgctgaaatcaaactttgccatccaacgatcttgtagttgtacaggctgtttgaagacggtagatatccggcccgcgtcccaattgacagttgcatctgcatgtccagtatcttgagggatttgcccaataagatcctgcacccgcggaggtaaggggggatgctgtccccagggggctagataatgaaaggcctgaataccggttactggccacaacccatccgtttccatgtacatctccgtagccgtgcgaatagattcgacggctggagtttgtgtccgaagagtggtccatccgggaaatccgacagtacaaaagtagtctctgtcttcacccttcggattgagttccgggcctaaatacgcaaagattggacggacaaccccgggttttccaaacgccgccgcgtaccacagtctatatgttgctaatattgaaagggaagatgtaacggtggaatccgttgttaaacagtcaaaataacacggtaagagtacccttaccacaattgcgcgattgccactaagaaccaagcggcgttcttcaaggttaaacaaatcggaggtttggccttcccgctctatagggggggaaaacgtagacttatatttccgacgtatgtaggcctttggtgtaattacctccacgtctaaaggtgtttgttgctgggtgtcaccgttagatttaagtgcggtcaggcgggcgtaggctagcgacgtaccttgcgtgtgggcgttacatgcgctgactgctgaaacatcaatggccacgggaaaattagccctcaatactccggtagatggcgtgttgtcattattcaacgcgtgttcatcggggattgtttttaacagaagacctgtattcgtatcagtctcgaatgttactggcgaataaaacgatttaaaccctaatacgcgccgtaaagtggccagggcagtgccatggagacaacgccaggtgtctgcgttacccagtggttcaaggggccaggcgtctaacgcagccgaggacgccgccctgcagatagacgcaaacgttgccgcagaaacactccccccatgcctggagtagcgacataaatcctcttgttgtacggtaatttcggcaaacttagggacgtatttcccacatgagtttttgcataataagtagtataacacggaaagaccgttctgtgttaattgtccggactgtgtccaggatgtgtatatgcttgcggcacaaatgtgtccgctttctctaaccaaggtaatctgcgttgcgtccatagcttggttgtggttcagtgcattgttagaggccctttgtgttgtacagaggcttagtatttatgtaaccccccctatggatgtccatatatggtattaacgggttataaactttcaaaatttaccgccccgtttatccgcggccacgatcccggggacagttccgatagcgctaattgtagcatggcttcggcatgcggggccaagtgcatttgatgtgcttgaaaatacacgtggcgtgcccaagcgggggcagtaattttgtaacgctgttgagagaacgaatggcgctggctcataagcaggttatacaactggcggtaggtacgacatgcagaacgatccacgttaattgaatcaagtaaagtttctagatcttttttttttaggtttttcacacgagtacttcccggaaaggtctgggtacttttagttacgcgggcgccaaataattgttcccaaattaaacgaaatagagcaatgttatattcgtgttttgtagggattggacggaagcattgattatggcatccatctaagaatccggttgttcgccaaaccgggcggtttaatataatcttagcgtcagtaacgttacagcgcataacctcaaatattagttgagccagcgaatccccgtgttgattgaaaagtgtattaatgtccgtatccaaaacttgtgttacacagccttcggtggacggattccacttgagtgtttttgcaatataggcacaacggcgaaacagctcccaatgtgtggttaaatttggggcggtagttatagtcgcgatgctaaattccccggttttgtccaggacgggaaaccaaccggaagcgtagtgcgtgtatattttttgaaatacgtcaaatgcttccaacgcttcaggtattcgtatacacgcccccaatattgccgtattgactagtctaggctgttctattggacatgcaagggctttaaatactttaatttgttcttcggtattaattgactccataagatacttttccataaacgcggtaatgttatcggccataaatccggaagggccaaaatcggtcaagcagctgtcattgtcctgtctaagagaacgcatacaggaagctacggcgttagcgctatgtctgagatcgtgtataaatgcacaaaattgaactggggaaacgtccgttattggacccatgccatccaatacaaccaaaatttggttagaggccaaaagagtttgtaagatattaatgctatcggctaaactccaaagagagcatctctcgaaaaggtgtttgtatttaaatcttgagaagagatgggtgttcgagcgtgtaaatgcatttgcacatcgttgcctaaatgcacagcacagtttgttagttatttgggtgtgtgtaggaaaccattgaaatttatttgcgatggtaaagtttagtaacattggcgagaacaggggtccgcatctggtccttgagccatcgacgtacatcaaaacttcattaagtagcaataaacgtacacgccctaatgactggtagaccgataccatatccggcccatatgacattggctttatgtaagcaaacatgctatgaaaatgagccatgtcaaaactcaatccaacggtcacgacggtagtgtacaccaacacgcgaaaatgtttccattcgtttacattacataggggccgagttgagtttaaaataagaatagagtctgtaaatattgcacaaaactgagcaactagctccgaaaacgataaagttgatgaaaatatacagatgttatgcccacattgtaatcgtagtgctagttcgtcaaaaaatgttccacgtagttggtgtatggtacgtacatcctcgtgttcaggagatcgtttaatgactcgcacaagcgtgtcgatgcccatatcacgcaggatcgtgcaagttcttccggagaacccaactcccgcgtatgtacacacaattgtgtgtatgttttcatctccacgcaatccggagattaaatcaataaactgcgagtttactgtagcatccatcgcgataatttgagaacagcgatttaaaagacgatataataggctatcaaccgcggaaagacgtctcattgtgggggagtataattgtccaatcactgacattacctcatccagtattaatacgtcgtagctgtcgatagcttcgctggatacgcggtgtaggctttcaagttgcacaatcaaacgtttaaaacccataatatatgtctcggatgtcaaatatgttacgaatccggagaggcctgcatcgttaaaccgttgaatcaacgtctgggtaaagctacggcgacatgagacaaccagtacgctaatatctgcctttaacgcgtgttgaagccactcaagcaaggctgttgttttaccagagcccataggggcacgtacgacggttaccgggcgagtttgtgacataccaggttttattagttttactggaacatccaattgcagttccaggctaattcccgggtgggtgtgtttaatccacgaaaccagatcccctccatataacgcccgcgcgagctgtgtactggacgcatagacggcggcgttgctctccccggtgttgggagacatgggaactcaaaagaaggggccgcgttctgaaaaagtctcgccgtacgacaccacgacacccgaggtggaagcgttagatcatcaaatggatacgcttaattggcgaatttggataattcaggtgatgatgttcactttgggtgcggtaatgctcctggctacgttaattgccgcctcttctgaatataccgggatcccttgtttttatgctgccgtagttgattatgagttatttaacgccaccctagatgggggggtatggtccggaaatagaggtggatacagcgccccggttttgtttttggaaccacatagcgttgtggcatttacttactacacggctttaacggcaatggccatggcggtatatacactgatcacggccgcgattatacaccgagaaacgaaaaatcaacgtgtccggcaaagctccggtgttgcatggttagttgtagatcccacaacacttttttggggtcttttgtcattgtggttattaaacgccgttgtgttattattagcttacaagcaaatcggcgtggctgctacattatatcttggacattttgcgacaagtgtaatatttacaacgtatttttgtggacgcggaaaattggacgaaacgaacataaaagcggtcgcaaatttacgacagcagagcgtctttttatatcgccttgcggggcctacgcgcgcagtgttcgtgaatttgatggctgcgttgatggcgatatgtatcctatttgtatcattaatgctggaacttgtggtggcgaatcatctacatacgggactgtggtcatcggtgtccgtggccatgtctacatttagtacattgtcagttgtatatcttatagtatcagaattaattttggcgcattatatacacgtgttaataggaccgtccctgggaacgctcgtggcctgtgctacgttgggaaccgccgcgcactcgtatatggaccgattatatgaccctatatcggttcaatctccacggttaattcccacaactcggggaaccttggcttgcctggccgtgttttccgttgtcatgttgcttctcagattgatgcgtgcatatgtgtatcatcgacagaaacgcagtcggttctacggtgccgtaagaagagtacccgagcgggtacggggatacatacgaaaagtaaaacctgcacatagaaattctcgccgcacaaattacccatcacaaggctacggctacgtctatgaaaatgactcaacatatgaaacggaccgcgaggatgagctgttatacgagcgatcaaacagtgggtgggagtagcgtgggttgtacttgtaaacccccaagcaataaaacaaacattcacagtaaccaaccatgatttgatgtttttattagaacgtttatcagggtttatcagggtttaacattttgcgcatttggaatgggagctctttcccgaaggttttcgttttggtgttacatcgatcactcgtgggcggcgttgtgtggatttatcggcgtcctctgttacattctcatcaaagtcaaagtcttcaaagaactctgagttcaaagcaacggtttctccgttgcacgtaacaagctcgttgtaccgtttgcacaatccacagattcctcctcgaccgctggatgaagattgtcccatcgcaatgaccgcaatgctgatgtaatcgcgttgtttcctgtgtctttaagtatttgtgtcactctaggcacatcaacttcgataggcgttagaacggctataaccggaaccgcacagtggggtgggatagtcggccagttatattcgtaaatggcagccgcttgtgtatcgacgcgcaatgggactcccacctcgtgtggtcggcgcacacgtcctataaaggtgacaaggaagggccgtagttttagcgctggaaagtaaccggataatacataggtttgtacggcaatttgtttaaagttagcgtgccgcggattggcaaatacaggaatttgaagagccgtatctccagtggcccatgcaatggttgtaattgtccccttttgtatgtccggatcattaaatacccacactcgggatgagattgtccgattgaggcccaaatgatgggcgtcgagttctgtaagggccctcccacctttaaatcctaaacgtttccattcaacgtgatccgttattaaggcctcgcgtgtacttgggtttgctgagggtccaaagaagcttacacatgggttttttatagtatataaaaagtcccgtagatttgccattgtaggtctatttattaacgtggtgtacgtccgaccgagcgggttatttttgtcatctggatcaaagaggtatttagcacgacatttaatttcaaaaaatgaaatgtcggtttctgcagggtggggatttagggtgccagttaaagggtccctgtcacatacaagaacgtccaacgacgcgcctataagtcccgttcgaacgtcgattaaaagtccacattcatacgttccgattcttggtgtacccacaaggagacttggagatttggtattgagcatgtcaaaattaaaaaacttagttgtagcttctggcgttaaatgatcaggagtacggatatcagccggatctataaacaatgcttcaactatcgctcgtgccgccggttcgttggtttttccaaacgccattgccgccgcatcaccgtatgtgtctgtagtgttatggtggtaaaaccactgaggtggaatgacgggtccagatacactccatttaagagttgatgcggtgattaaatttcgtctgagtagtgtccaaatggcattgtcgccctgaccacgagtctccgattctattgttaatagaatacgtttaatgtcgtcttgggttaatttggatgctaactcttccggacgcggctcctgaggctgtgtggacgtcttaaagaacagtgcgttggtagaaccgggtgttgtgtaggttacatcatttggagactccagagttgttagaattttatacatgtgggataaacgaataaaaatacccgctgtcatcccgcgacagtccatgttcggtgatgtcttctgtagcgtgtctataaaatggtgttcaacgttaatcgtgttaatatccgtttttacaaaagggtgctgtagacctcccacacgggcaatttttttggctggctgggggcttatgtcgatcctatccaatcccgatcgtgccataataaagggtgatccgagcgtatttctgaattatcgtgacacaacaacgatgtaacaacagtggctgggtataatgaggccggaatgcgtatgccttcgaaaagctttgagtgcgttacgccgtaacgcactgcgtgacactggaatatccggcgtaaagaattccgggaaatacgggtgttcagctctccggcgtgtataaagggattataatttaagtccccggggatgtcagatgggagtatatatggcgccaggacacatcgatatgccagcgtatcaagcgccaaatctggtgataacttatgaccgtagtagtgataatgcggggtccgatgtactgaaatgggcagttgtccgggaagacgtcctagcaggataacttctaagagtgcttggcccaatgcataaagatcaatcgcaagtccaactctttggggcaaggttccagtatatttagtaaggcccgttccattaatataatcaagcaagatttcagggggttggtttgttccatgactcaacaccaaacgaaatgacatctgcgatgcatcccggggtacgcgtagtacgtgctccgggtgggatggatttccaacttcaaatatcgctcgagtacaaagggaatacgtatttaatgttactaggctatagtctccgattactgctgtggttatttccaacgaggcaaagttgtcgacgttaagaaaaatattgccacatttcacatctaggtgggtcaggccgcacgttcgatttaaaaacgtcaacgcttgagccaaatctaaaaatacatgggcaatttttctgtctatgtgatcaggtattgtcaaccgtctggacaggcgaacaatgtattcatccatatccatgtcgtatgccggaaacagtagctgtttggtttgtaacgaaaaacctaaaaggcaaactatgctagaaatacctagcctttcccctgctcgtatagaaccctcactcgctaaaatcgcgttaattaactctctattaaaaacacgactgtccatggtttttacagctatttttgacgatgggtatatatgaacacgcccatacgttccccgtcccgcaaacctgggtctatctcgaatctgtaatttagaaaaacataactgttcattgagcgtgaagatgggtacaattaaacgggataatttggaaattctaaaaacccatgggggtttgttaaattgtggaaaaacgtccaccctttcgcgttgatgtattggatctctcgttaagccgtgctttaataaaaataagcttgtctgttgtgatcgttctggtgattccatgcatgttgcagttgacggattggcccatggatgatttacacatccgtgtgtggggttggtggattctcgttcttgctgatcggctgcggttgcatttggttcatgtccgtcggtattgtggtgggaacgcaaaggtcctgcagttggagatatttggaggttggggggtgtgtcgtcagcatccattgtgtaagtaacgcttcgtcgtcttctccaaaccaagtatgattttcgtgttcgatgttcggtcctaccgcgtcttccagtctgtctatattatcggtattatcgtcttctgttttatccaaaccgcgaataaaatcgggtgctatatagcgtctgtttgtatttaaaatctgttgaatacttgtttgttcctcaaccttggattgtatatcacgaatcttctgttcaactgaagctatgcgagctgcagagcggagctggttatttaaatcggcgcaggcctcttttgcagcagtaaaggcatacacaaatgctggatcttgtacactcgcacccccacggattagatcgagggtccgttctttaaataaccccgcgcggttatgcgcctcaactagtttgacacggttacgcctatgagaagcgtaggttggagtgtggcctgacatgaccaaagtgaatgaatgcggccctgaaaatgtttatgatatatacgtaacgagtacgtaagatgacgcggcttcctgttttactgcttacaagagatgaggcggattccgtgaattgatgttaaatgtcattgataatgtttggtcgtacgcttggtgaagaatctgtaagatattttgaacgtctaaagcgtcgtagggatgaacgctttgggacgttggagtcccctaccccgtgttccacgcggcaagggtctctgggaaacgcaacccaaatcccgtttctgaattttgctatagatgtaacccgacgtcatcaggccgttattcccggaattggaacgcttcacaactgttgtgaatatattccactgttctcggctactgctcgacgggcaatgtttggcgcgtttctatcgtcaacagggtacaactgtacccccaatgtagttttgaaaccatggcgatattcggtaaatgcaaacgtaagccctgaattaaaaaaggctgtcagtagtgtacagttttatgaatattcaccggaagaagcagcacctcatcgaaatgcgtatagcggtgttatgaacacatttcgcgcgttttctctgtcggatagtttctgtcagttgtctacctttacacaacggttttcgtaccttgtggaaacatcttttgagagtattgaagagtgtggaagtcatggcaaacgcgcaaaggttgacgttccaatctatggcagatataaggggacgttggaactgtttcaaaaaatgatcctcatgcacaccacgcattttatttcatcggtgctattgggcgatcatgccgacagagttgactgctttctgcgtacagtgtttaacacgccaagtgtttctgacagtgttttagaacacttcaaacaaaaatcaactgtgtttttggtaccacgtagacatgggaaaacatggtttcttgtaccattaatagctttagtaatggccacgtttagaggaattaaagtgggttatacggctcatatacgcaaagcaacggaacccgtgtttgagggtatcaagtctcgcctggaacagtggtttggggcaaattacgtggatcatgtaaaaggcgaatctattacgttttcatttaccgacgggtcttacagcacagcggtgttcgcgtcaagtcacaacacaaacgtgagtgttttataaatttaacctttaatatattactgtaaatgttgacatatacctttccacaacggcggttgagttaaggtatactaggtggttgtaggttccggttcacccgataatctttgtgtctcggggaagcaaattcgctgaagcagaccacagccgttaataatagcccggcttaatgtttctccaaacatataaagctgccacccagatgaatttactggtacagagagaccactggcgttggttcccgctataacgtcgccaagatttgcggtaatgcgaggatttttagtactcgtaattcgaatgcaggtggtgacatctacaaaaagaacctgcgtggcgccaatgtctacctccacttttaattcccgctgaccggcctttctccacatacacggagcccaacacacacaaccttccgcatgatttgtgacatggggtaacgcatacagtgcccccacgtgaactctatgattacattcatcacatccgtccgcatggctgaggagtcgatttaatacagagccaagtatccgagcatgccatccggcgggacatagccctattaaattaggttccatagccagtacatataaacgccttcgttcgtctgaccaccacactcccggagaaataactttacatgcgtatggatttttcggaagccgcgggggttgtaagtagttgcttaagtttggcgttggtgtaagatctgcgggggtgggatctgctcgaggatccggaatagatgttggaagggggtacgcgatcgggttcttaaacgttgctccaaaaacatggtctatgttttcaaccggataaattcttaaagtcgccgtcattgcgtacgagacctcgtaattaaaatttacaattacatgaaaagtcttcggaggtaagttcatctgacgtgggcgcgtgatgtaaattgtggctacaacaacggcaatattagtagtatccgtttgaagggggataaacggagcgatccttaaagttataaaagcagttgatcgcattattttcacccggggatcggtcaggatggacttccataatcccatatccagcgttaatgcatcgcagagtctctgaactgcctcgggggttaatttgcgcgctgcacccgtagcggtgtacagcggaaatatgcgttgtaattccatgagcagaaaaacagtctagcggattgccgcccgggtacttgtgggtttaatgccacccacccggttattttatattttaagagggggtggaaacgggagaaatgacgtaaaattacatatgaagagattctggtgttatgtttttatagtgacactaatttatttatgggggttgggaatagagaagcagaatctgtctagaataggtccgattaacgatgcaggtagtgctgcctgtagggtatcggtaatacaaaaacatgccgcaaatccccccggtaaaactaaaatggattgtaattgctggttaaatcctagacaaatgtacgcgtaacattgaccgggtaaatacttagaacaaattccaatatcaacaatatccgcgctgcgtataaatttacccctcagttgtgtggaattaccaataccaaccttttctaaggctacgggaacggggaccttggaaagcttaagtatttcccctcctgaattataatagtcaaataaatatatagaacgattacctaaccagcatgggaaggaagcgtgaaggtagggtatataccccccaccttgtggtcgtgtatatacagatgacagatacgccaaaaccgcatacatcaaggagctgttataaaacgcatccattgacatttccgttaacaccgaaactatagtctgaatcaggtctggtgtgcgggctacaatttcatcaataaccgtttgggaagaatctgcaatatcatattccatgagttgttgtagagtcgggttcgtttgtaactccgttataagaccttgggttagcgatgtcacacacgcttgtttaaatacctggtttaaaaacatttcggcgcctggtttaaaggcgggtaagggggtttgattatttaggacgttagccaaaaacggtaaacgcgcgactagctcttggcgagctgtcacatgtaggctttggggattgtcaacccgggcatttatacacgcagcatcaataatagcctgtgcagagtgatataaaattggacttccggtaatacgtcctccccaggcagaggatccgttgtaagatactacaatcaacggactgggggattctgcgtaatgtcgcggtacaattgataggggacgccgtttccagaaatctgctggagtgtccccgctaactaattgggcataacagatgtcgaaccattccataagactttggggttctgtcgaagctggggtaaacaatagaacgtcttgtaaaggtgggatgctggcggacgaattgtttttctttcccgtaaatcgcccttgtccaggcggctcaaggacgccatcaaaggaaccgttattgatcggatctgtgttggaagtttgcgctccgtggccctttgcactttgaagcaacccagatgcaacgcgggaactagaaggtcggacggggtgcctggagttaacaatgtttacggcccgttttattagctcaaggacgtcccgattattttcctgtatgcgtgtttcagcaggggagtcatcaatacctccagaagttaactgtcgatcaagatcgattatggatgaaacgggtccaatattgtccccatttgacgtgtgtgattcacccatggctgccaccatatgctctgcgtatatttttatagacgatgcaagacgaggggtgcatcggatatacgcaatcagctgtttgcataataaaagtacccgttgtccatcagcaaaataacgcgttccgtttgggattagttctgcatacataatacaaatatcacggtgcttgcggtttccagtatttattcgtatcgctacaacgttaaatgcatcaaagaataaaccggggctaagataaacaggcaatgataaaatcaatccccctgaattatgcgtggccgaaaaaacgtgtgaaacaaatggttccgtttttggtattaagagatttgttaaggcgttatcgggaatgtacgcggcgaaaacttgacaccacggttcgcattgacctgtagcatgatatcttgtttgtacttcaaccttgaagcgttgtccgggtttctttaaaatcagtaatgcgggatctattccggccgcaataagccccgcgttaggtatcacaacgtgtagtaatccttttgtgtgatcattatgccaaagtgcatgtttggtttcatttgccaaatgggcttccattatacaccggatatggttgtactggaaaaaaaaaagaaatatgtacgtattcaaacattttttacgtacgtggtatttaaggatacatttaaactttggtggggtaactatatatctttctatcgttccagggtatccgaggtcaagattttaatcttctgtttgtggatgaagctaattttattcgacctgatgctgtacaaactatagtcggatttttaaatcaaaccaattgtaaaattatttttgtttcatcaacaaataccggaaaagcaagtacaagttttttgtataacttacgtggatcgtcggatcagttgttaaacgttgttacatatgtatgcgacgatcacatgccgcgtgttttagcacatagcgatgtcacagcttgttcgtgttatgtattaaataagccggttttcatcacaatggatggagccatgcggcgcactgcagatttatttatggccgactccttcgtgcaggaaattgtaggtgggcgtaaacagaattctgggggtgtggggtttgaccggccattatttacaaaaactgcccgtgagaggtttattttatatcggccgtcaaccgttgcgaattgtgctatattatcgtcagtgttgtacgtttacgtagaccctgcatttacctcaaatacacgagcgtctggtactggtgtagcgattgttggtcgttataagtcggattggattatatttggattggagcacttttttcttagagctttaactggcacgtcttccagtgagatagggcgttgcgttactcaatgcttaggccacatactcgctttacaccccaatacatttacaaacgtacacgtttctatagagggaaacagcagccaggattctgcagttgccatatcgttggctatagcacaacagtttgctgtcctcgaaaagggaaacgtgctatcttccgctccagtgttactgttttatcattccatacctcccggatgtagcgtggcgtaccctttttttttattacaaaaacaaaaaacgccggccgtagactattttgttaaacgatttaactccggaaatataatagcctcacaggagcttgtatccctaacagtaaagttaggtgtagaccccgtggagtatctatgtaaacagttggataacctgacagaggtaattaaaggcggtatgggtaatctagacacaaaaacttacacgggtaaaggtaccacgggaacaatgtcagatgatctgatggttgcattaattatgtccgtgtatattggcagttcatgtataccggattccgtgtttatgcctattaaataaaaacaagacgcgtgaaatgtaactagactggttgtgtttttattaacacctgtttacacttgaatcacggccgtgcggtctcccggatgaacagtagagggtccatcaaacacacagacgcgtaaaattgcgcgagttcccaaggtatcccccagtctagatgatgttgatatccaagatgaaatagtttcatatatgggaaatcggcgatggccgtcttgaatccgcggcattggcggtatattaattaactggccggtttctctaacgcaattggccgtttgtatcaataaatttacataaccgtcgtgtgctccttggactaacaaagttggaatcagcgccaataaaagcagacatccctcgtttatggaaaacattagatttaaaaccaatgtgcgaatagccgcatccgatccgtcccgatgttgtaaatttgtttcgagttcataacgccttccattgtaacaaatgacatccgcgcctcgtagaacttcgtggggtaaaatttgagcacccgcggccgtgcgctcaacggcccgtgcaaccactttggcgatgatttctcgcattaaggtctgggggatggttaaagggaaaacaatttccagtcctacagagtccaagcgaattgagtctgcggacccgaaaaccggaggaagtaagcagatgtaatcgccattacaaagatcaacgggggatgtattttgaataaacaacccgggtgtaggagtacccacgccaatggcatgcgccaacaactttcccgggatgacccgtgttataactgccgcgaatcgcattcggtatgcctctaacagcgagagcgtgtctggtggagcaccgttaatgtaatatgacgacagcgctatatccaccagtgaagctcgatgacgcagggttgagaaggtaataatttttccctcacatttctgtaatgcagatgtttccgccggggatagttctcctggtaacaatacctctatctcaaatggcatagccatgttgtttaaggaagcgtgaaacagaccaagtcggccgagcgtatccaaatctcaagtaagatgccaatgcgctctacagggcttttattgggagtgggtatgtgggcgtggtgaaattatcgcggaagaggaagacatcccctaaggggcgacgcgtctcgaatcagatattgggctaagtgaacttcatctgccccggtttctcccgcgtgagccgttcgtaacatggccgcatcgcttgagcatagtggtggatatgcttcttgaaaaaggccacacggatcctgtgtcatttcggtagaaccgggagggcgtttaaattgatattcagtgtcggtggagctttgcgacgccacagcctttgcctccattagaagccgatccagtgtattacaattagtgttaacctccgctggtgtaaaaaacttaaagcatgggctgtagataggagaagcgcctgtaaggttgtatgttccgttgtatagcctgtcaccgtatgaatgtttttgtgatgcccatgggttaagagttgctcgatctgtataagcaacatccgattgtgtgtgatcaaacattatagcctctatgtcggcgtcacggtcacccatatataacattccagatgctcgacctctaggattgcatgcagttctaaaatattgtaggtcagtggacaccggcatggccacaaactcacacacagaggcttgccctcgtgcaattcctgccgatgtagcaggacgtagtccgccgaagatgggtaggggttcggtgggatttaagcgaccccccgatgctgttatacgacgcaacgattcggtaacgttatcatgtaacattggcactcctcctcgtgaaaaaaaaagattttgggcagtattgcccatatccgtgagagggcatcgcagggctgctgtggcacatacagctgtatacccgactcccaggtccacgtgagctctgggttgggttagggtaaagtttacccccccaatagcatcatgatggtgtacttggatttgtccgacaaagtacgattcagaagcacgctcggcatataaaagttgctctgtggcaaagcgatcctggcgcactacggtaaaggcaatcccggggtgaaatcccgttcgtagttgatgtgtaagagatattggtgtaaacttaaaataccctccaagaagagaatatgtaagagtattaaaatccgacttactatgcgttacatggtaggcaacgggttggcgtatagttgcgtggtggttggctcccagaaaaggagggattggtggtaccatttttgccaaaacccgcctagcatttgtcattccacgcaatgatgccaaatgttccggacatgcaaacagagggttgaccggaacgggataaaaaaaagtacccgttgcaatggtttcatcgtacgcctgatatgccatcataataaggccatggtaaagcgctccgtcatatattctcatatttctggttgttgccgtggcggctcccgcatcgggggcgcttgatactaaaatggccgtcgttcgttcagccatatctcccattaactcttgtagtgtgagcaatgcatcaccatcaacggttaggtgtgcattatggaagtaaacgttaagagagttcggaacgagttggtgtgcgtgaagagggtgtcttggatcttctggggtagttggggcttcttcatcagcgggaatttccggaacgataactgcctgtaacgcagggtataggcgatcataacgcacgcccattgtacaacaggaaccgcgggaaaatgcaggaatgacaatatagtagtaaatcttggagagaataccccattcacggtcatggtgtggagtaatgggaataccctgacccgtgtctccccgaacgggtctcccgtggattaacacattatcgcgtcgttggaagttatgcccggccatatccacaaagtgaagggcttggtatccgtttcgcccgcttacacgaattgcggggagtcggtctcgggcggcttcatcacggtatattaacgcatcacaatcccatagaataggtgcaataaacgtgtcatccgtaaggatgttatttagcgcttccgaggtctcgccgttatggccctctccttgtattgtaaaatcggttatagtttggcgtaatgctcttacatgctgcagtaaatcccgatatatattaatacagacttcgggaagctcaccgtttccgagatatgtagttatgtacattaacatgtgaaagttatttacaaatgccaccctgtgggattgctcccaatacccgcgaatacactgtgttaacagtcgcagtaacgcacagaagtttctttcgtttccatgaataacagcctctagcatgtagaaaatagttgggtatgcgcggtcttcaaatgtatcctttacggctttaatggttgccggggtcattgtatgtcttcccaaaccgagttgggttccgcgacagtctcgaaatgaaatgggacatagaggcacgggaatgtttccgttgataatccgtaatgttgcgttaacggttggcatggcttccgggggacgctgcggtccgggaaggtctacgtcccccggtgcaacaaaaaaatcaaaggcggggtttaattcaaaccttagacgcgggttgctcggagctataaactgtagaattgttaaatgttcgtttacccaatgagggtgatgaggcatcatatctgcccacgtttccataaacctccccatttgaacatccaatgtgtcctctgtaccctcggccacgtatacaccaaaataacactgacgatctaaatgttgttggcggagggcaacaagtgtggcctcgacatcaagcaatgaactgtggcagatggtacccattgcatcacgaagagtcaactgtgttaatatcccatctttattataaaaaaaaatcccttggggtggaaattgacgtggatcctgttcggatacagttgaaaaatcgccggcgtgtcgtgtatatctgtccatggagtttgcctgaaacactcccattggcatgataaacgtaatatctatatttccaataagagggtaggcaacgcgcgtagcttggtagacccgccgttctaatgcttctaagaatacaagtttatccccaacaatcactaaatccgcaggaacacgggcgttaaccggaagcccagctgtcgttgaatcggagttggattgtgggggtatagacggtatgtttaacgtgttagggtcggttatatcaaggagatggcgggctacatcatccattccgcggacggcctttcccatcacaagggcggttaccaagtttgtcccctgtagaaccatttcgccatatgttactggtacgtcagcggcggtgtcgtcaatttgtaaaattccctgtaatagttgccgttttaaggttgctgttgttaccaacacaccgtcaacctgccgtccgcgagtgtttgtatgagttattcgtgataccatcaccgatggttgggtgcacgaaaccatatccgacagatacgcagagatcagcctaggttccctggcgtgtcgggtcataaaaaacatatccgcacagactctacgtttgaggtccgaaagtagggccgcgcgtgcaacacgatttagatgtccctcgggttggaatttattaattggtgaaagcagcgatagcggtggggctttctccaatagaacaccaagaagttgatcggcagtgcctcgttcaaatgagtccaaaacggtgcgtaaattacgagccatctgttggatagctcttatacgtaacgatgagtcaatctctgtcccatcgacatatgtgttacttaacaaactcaacgcttccgatgcaattgcaaacgcagcgcttaacgaacgcttgtgtatccgcttaaccatataattatgaacaggctgatcgacgggatgtgggccatcacgtgctatcatgggttgttgtacctcaaattgaataacgccatctcgcacgtaagccagctccggaaatttagtacagatgcaagcgacagacagtccaagttctagaaaacgcacaaagtttaatgtattgcagtatgtccccaaaagaatatcgaattgagccgagtaaaggctgttatcatctgatcgtatttgtttaaaaaaatcaaaaatgcaacggtgtgcacacacctctatggttgacagcacatttccagttggaatgatccccgctgggatgttaaataacccagcaatacgatcagattccgttgtagtaatcacgttagcgggacatgaaaccgttgtcattttgtcagcagcgttgcgacttgaatccggacgtgtaaacgtgtgcgggaacaagaaaactgcgagaagtttgatgtagagtggaacatatgtatgggtgtttccaagtaacacgggggcggtaattataaatacccaacattatttttagactgaacaattatagtacatttattgaaatggactaaaacgaaatagatgtttttaacataacacggacccacacccttggcccaataaaggataccgtgtccaccaaacagtccatagcgtaaataactgccgccattaccagtaacacggctggacttggaccccacgacacaggaagtatttttgaaacgctatctggaaaaataacctcactttgcaagtgtccggtaatcaaaaagaacacccgggtgtctataaaaagagtataatacgccgtaatacaaaatagcattgttcgagtcacaacaataattccaagcagcagttgctgggatgtagataagggtagcaggtctgatcgtatatttctgtagacacacaataacataataataagtcgaaagtgatgtagaatcgtcagaagtaacccggctgtgaataagagcatacagcgtgtcgctttatagtaaaaaaaaaagaagatacaacatattggttgaatcaacaccgtggatataatataaaacacggagtgttgcgtaaacgccgacctgtttacggtagatgtgcgggtacatgcagagcttaatagtaagtccgtatcacccccatacgataacataaccatggtgttataaagcggtgaattatcactggatttacacacttttgcgtcctcttcggggtgctggttaaccataacgctaagcaagtcctttgtctgttccgagacgcgggcttggggtgggttcataacgttcagtcgcagtttatagtccaaagtaaaaatgttgacaaagttaaagccgatccttgtattatgtagaatataccccgcctgacagactgttataacaccctctctaaatgtttacgtatgtttggagcatgtcacatagctgacgtgctaaacggtaggaggtgtggttgattggattgattggatcttttcatatgacgttaatgataccacggtgttttgaatgtttgcgtgtagttatatatttctcatattcggtgtggacctaaggttggcgatcacacgatcacgggacggcaagttcgaggttaatgttccgataaacgctttaatatggaatttccatatcattcaaccgtatcttataacggcgtaacgttttattttaacgagcgtgctaccagggcgtattttatatgcgggggatgcttaatttccataccccgcaaacatggaggcgagatcgcaaaatttggacatgttgttcgcggggtcggacccggtgacagatctgttgccagttacgttcgaagtgagctcaatcgcaccgggaagacatgggcggtatcatccaataataactgcgtgtttttggatcgagtggccttacttgcagcgggatcgggggcggtggatcgcgacctttgcggaacatttgatgttgaagtggaggaccctacgctcgcagattatctcgtgtccctccccgtgacgcatttaacattggtggcgggggtagatgttacgcgcgagaataagctaaaattgtttccaacacccaccgccattaataccacaaatggctttatgtacgtaccaaacgaagccagtttttcattggtgtatatgcgtatgttggagttaccagaaagtttgcaggagctagtgagtggattattcgacgggacgcccgagatacgagacgcgcttaacggaagtaacgacgatgaaaaaacaagtataattgttagtcggcgcgctgctgatgtggttacggaagacgtaaaagcagatgatgtgccgatttcgggtgaaccgtattctgagaaacagcctagacggcgtaagaagtccgatcatattacactaagtaactttgtacagattaggaccatcccccgggtaatggacatttgggatcctcgccataaagccactactcattgtatccgcgcgttatcatgtgcggttttttttgcggacgaggttatatttaaagccagaaaatggcctggacttgaagatgaacttaatgaagcccgtgagacgatatatactgcagttgttgcggtatatggcgaacggggggaacttccatttttcgggcatgcttacggacgtgatctgacgtcctgtcaacggttcgtgattgttcaatatatactgtctcggtgggaagcgtttaattgttatgccgttattgaagatttaacgcgtagttatgttaacgcgttacccagtgatgatgacacggatcaagttgctcaagatttaatacggaccattgtggatacagcaaacagcctcttgagggaagtgggctttattggcacgttggctgaaactttgttgttcttaccactcccccagcttccctgttacaaggaaacgtcacatcttgcaaaaaaggaaggtgtgcgaattttacgccttgcaaaaacaggagttggtttatcggatactgttccggttgatgtttctgtcacggaaaggcatgagtatgagatatcccggtacttagataccctgtactctggagacccctgctataacggcgctgtgcgtctatgccgtttattgggatcatcaattcccattgccctgtactacaatacaatatcgggtaatgcctttgaaccgtattttgctgggaggcgttatatagcatatttaggcgctctattttttggtagagtgcaccaaacaccatttggggacgggaaaaaaacccaaaggtagtgtgtattattcgcgaataaagtattgtagagaatacgtttatagtgactttttattatacatgttttttatgtcagaggtattttattatattctcgaaggcgggaatttccacataacatccatccgataataccaaaccccactaccgccagaaacgcccctcctaaagaggccccaaggtattgtcccgacattcgtatggcttgtcgtcgttcgaatcctagaagcgttaccacagttccgtttggaaacaacaacacagccttagagtcatccccgtgcatgtctggattgaagggtggaattgtggagtttcccatagcggctagttgtcgttctgtatctttgctgtcaataataattatatccataatcgcccccgtggttagatacctaagaaaaacacttccgcaatacaaacattcttttaaattgtccggatggggcagtgcgaccgtctctatgacaccatgttcagacacgcaagtatccctgcttaaataaacaacggatatggggttatatacatccacatctgccagggaatataccaaacccctttgaggtttgtttcgtgtaatcacataactgtgtccctggacagctggaagaatgagcacatattctccgttacgcgcggctgcatcttgacacgtaaatacttctggtacatgggtgtggagtatatgcaaatctttggcagtccatgtggtaaaaatcatcatggttttaaatgccgcgtcgaatatttcagattcgtctagttgggtatgcaatacctcgttaagtcctgggcgtgttggtattgccgacaggagattcataacatgaatctcttccgtgaggtctgtacgaagggaacccatacaaggactgtatacgtttggtattgtaaacatgtgttttgaaggatttaagtatgccaggccttcttgtatgttaagtgctgcttgcgtggcgtgagctgccgtacacatggatgtcattaaaagcaaagttgtgcgaccgtctaatacccgagatgaattttctagtccttcgcggaaatttaataaaatcattgaggcaaaaaataaagcctgcctctctgtagcatttaaattttgcttcacaagcagccccttgtatatgctcattataacacgcctggcgagagaaagtgcattcacatggtcttgaccacgggaaagcgcgtatgcggtctttagttgatcacgggcttcatcatatgaaataaaataatcgacatttgcgggttttacctgaccaaaaagaagtgaaagttcgtcatgaagctgcgatggatcggcaaagatcagatccgaggttccggatatagtgttgggatgagctcctgctcctatccgcattaaaatgtaattaaggaattttaattgatactgaacatctacgatctcatctaacagaaaatattctgtggtacggcccatttccgacaacgcaaaaattgatgtggctattcttgcggcgatatggtaatagctttcctcgtttatgtcatgttgatccgccttcgttgtcatccgcagagcctccgtgtgggccatggataaatgatagcggtaatccaaactctcttcgggatatgcgcatatatcgaccgtagcatgctttgaaaaattcatatccaacccacgtccaagtaaataaactcgataagatggccccggatccggacccggtggatttagctggaaccatgtggtgtcgcttgtaaccgcgttcagttttactgtatgtggtacaacaattaattctatcggtggtccagaggataaagaaatgagcgagctcataaatcctacaccaatatttacttccacacgacccgagtcgcttgtgagaagcaccgaaccggtggcccagtatcgaattggccataccgacccaaaaaggggaacgtgtattctcaacgttgagttggtgataattgcttcggcagaaaaaaaagtatgtcgggcaagggcatcccatgtagcaaaatgcgctttatgttccagaatagtattcttggggactgttgggcgagcgggtaaaagacttaccccaaacggcctttctgcagttgctgcggtctcagctctttccaaatgccatacaagggggtttggtgggaacgtagtaaacgcaacaagatgttgcgtagttaaatacggcgcaaacgaactgtcaaagaagctcacgtcgggtgtcacagggtgactaagaaatccaaaacgtccagcaggaaacggtgctcgatgttctgctttgaaatggtatggcgataacaagtattttggaaatataaccagcccgacgtctccttcgtgtgttgtagggttaaccttaacaataaccaagaaaacgtgttttctatcatttccccagtgaagtgatttaatgagttcttcatcgaaaccagtaggataaaaggcttctaatttcagagacatattacggtcggaatattctcgtagaagagcagacatatgtccgatagagcgagtcgcaggggttggtgttacgtaagatttattagccgtggtccaaagaggaagaattaccaccgctaaaactagcgcaaacatagtcgctgttacttgcgctacaatatcaccgcaacgttatgcacacagcgtgcctttacccctcctcacccaccaacaggcttggcggcttttaatattaccactccgttttagggagataaaggcgggattaaaggatgtggtaataaatgacgcatatataaaaaagaaaaacacgtacacgcgagtatgacaatgtgtatcatctttttactggtacatacgtaaatactaggtatatttaggaagtgttgtcctgaacggcattaacaagctctttcaatatattccatgcaccggaggacatgtttgccggggtcatctggggtagcagagtttttagttcttgtgccgcatgctggggtgtctgttctaacgataatacgaacggagacatgcttcgtgagcagtttgaaagggtctccattccccatgcccataacggcagaatatttccaaactctccgcaaagctccggaagtttaagcacggcgaataacgtgtcttcaatcccaggtacttcgcgtagttttatacactcggatttttgtaatttctgtttaaatacatcattacaaaatgacagtgtgttccagcccgcgtgccagttgttagttttaagaaatataattgtattaataagcattatatatacatttctcagaaccataacaaacggcagattaaccgtttctcccggtctggcccgtttgcttactctggataaatgactggggagtgaaacggtacaaactaccaagttggtcccggggggttcagcgggaagcgtaaacaataacccaggaagcgccgctggggacatatctcccactaagtatctggacaagggaaaacatatagttgaggcgattgggtgtcggtcggataacataattttatacggctccttatttacttgtacgagatccgatgtacttgtgtccatcaatgccgagattttcgcatgcataattgcatgcggagaacagaacaggctctgaaaatgagccgtgaggcgttgtgcgtcttcaggcgaaacgtctccattaagacggcgagtttgtgttccgtaaattccgcaaatggcgtcctcccctgcaaggttacgccaatacgacaggggctccccaatgagtaagatccggtttggtgttattgcaaagtggtgtaaaaattcttcggcggcggttgtttttccaattccatacgccccgtccaaataaatacgcaaaacgcccatttttacatcggttttatccgttgacatgtttattgtagacaaacgcgtcttaggttatcttctgggacggaacttcaaatatgtccgctagtcgaattcgggccaagtgttttcgtttgggacaacgttgccacactcgtttttacgatgtactcaaaaaggatattgataacgtacgtcgaggtttcgcggacgcgttcaacccgaggctggcaaaactcctgtcgccgttatcccacgtggatgttcaaagggctgtacgcatatcaatgtcgtttgaagtaaatttgggacgccgacgccccgattgtgtttgtattatacaaacggaatccagtggtgccggaaagaccgtttgttttatagtggaattaaaatcttgccgttttagcgctaatatacatacccctactaagtatcaccagttttgcgagggtatgcgccagctgagggataccatggctttaataaaggaaaccacacccacgggatctgatgaaataatggtgacccccctccttgtgtttgtatctcaacggggtctgaacctgttacaggtaactcggttacccccaaaggtgattcatggaaaccttgttatgctagcgtcgcatttggagaatgtagcggaatatacccccccgataaggtccgttagagagcgaagacgtctatgcaaaaagaaaattcacgtatgttctcttgcgaaaaagcgtgcgaaatcatgccatcgttccgctttaacaaagtttgaagaaaatgcagcttgtggggtggatttaccccttagaaggccttctttaggtgcttgtggtggaattttacaaagtataaccgggatgttttcccatgggtaagaaaacagcttttaaagcagtaccggtttatattcacgccagttgactttgtttgctgcagacaccatgacggcgagatatgggttcggatctatctcgtttccgaataaatgtgggatatttttgtctaccactaagaactttatagcccccaacttccccatacactactggacggctcccgcgtttgagttaagagggcgtatgaatcccgatttggaaaaaaatacgttaacgttaaaaaatgcggcggccgttgccgcattagacaaccttcgcggggaaacgattacgttaccaacggaaatagatcgtcgtttaaagcccctcgaagaacaactaacgcgcatggccaaggttttggattccctggagacggctgctgccgaggcggaagaagcagatgcacaatctgaggaatgtacacgtacagaaataatacgcaatgagtctatacaccccgaggtacagattgccaaaaatgatgcaccgttgcagtacgatacaaactttcaagtggattttatcaccctggtgtacttgggaagggcaaggggcaataactctccagggattgttttcgggccatggtatcgtactctgcaggaacggcttgtgttagataggcccgtagctgcacgcggagttgattgtaaagacgggcgcatttcccgtacgtttatgaacacaacggtaacatgtctacagtccgccgggagaatgtatgttggagatagagcgtactccgcgttcgagtgtgcggtattatgtttatatttaatgtataggacatctaatagtgtccacgaacctcaagtttcgtccttcgggaaccttatagagcacctaccggaatatactgagacatttgtgaattatatgacaacacacgaaaataaaaacagttatcaattttgctatgatcgtctaccacgcgaccagtttcatgctcgtggggggcggtatgatcaaggcgccttaacgtcacattctgttatggatgcgcttatacggttgcaggtcctaccgcctgcacctggacagtttaatcctggggttaatgacattattgatcgcaatcataccgcatatgtggacaagattcaacaggcggccgcggcgtatttagaacgggcccaaaacgtgtttcttatggaagaccaaactctattaaggttaacaattgacacgattacggcgttattattattaaggcgcttattatggaacgggaacgtatacggagataaactaaaaaataattttcaactgggtttgattgtgtcagaagcaacaggaacccctaccaacaatgtaatcttgcgcggagcgacggggtttgatgggaagtttaaaagcggtaataataactttcaatttttatgtgaacgatatatagcaccactgtatacgttaaatcggaccacagagctgactgaaatgtttcctggattagttgctctttgtttagacgcgcatacccagcttagtcgtggaagtttaggaagaaccgtaatagatatttcttctggacagtaccaagatcggctcataagcttaattgcattggaattagaacaccgccgacaaaatgttacatccctacccatagccgccgtggtatcaatacatgacagtgttatgttgcaatatgaacggggacttggaatgttaatgcaccaaccgcgtgtaagggcggcattggaagaaagtcgccgccttgcgcagttcaacgttaacagtgactatgatcttctatattttgtctgtttgggtgtcattcctcagtttgcctccacaccgtgagtattcactatccggtccgtggggtgtttataatggctgctgaagctgacgaagagaactgtgaagcgttatacgtggctgggtatttagccttatattcaaaggacgaaggggaattaaatattaccccagagattgtgcggtccgctttgccgcctactagtaaaataccaataaacatcgatcatcgaaaagactgtgtcgtgggtgaagtaatcgcaatcattgaggacatacgcggacctttttttttgggtatcgttagatgccctcaactacatgcggtgctgtttgaagcggcccattcgaatttttttggaaatagagattctgtattatctccgctagaacgtgcgttatacttggtcacaaattacttaccctccgtatccctgtcttcaaaacgattgtccccgaatgagataccagacggtaatttttttacccatgttgcgttatgtgttgttggaagacgcgttggaacagtggtcaattatgactgtaccccggaatcttcaattgaaccattccgggttttatcgatggaaagtaaagcgcggttattgtcgctggttaaagactacgcgggtttaaataaagtatggaaggttagcgaagataaactcgccaaggtgttattatccacagccgtgaacaatatgcttttaagagatagatgggacgtggttgcaaaacgtagacgcgaagccggaattatgggtcacgtttatcttcaggctagcaccggatatggacttgctcggataaccaacgttaatggggtggagtctaaattacccaacgcgggtgttataaacgccacattccaccccggcgggcccatatacgatctcgcgttgggtgttggggaatcaaatgaagattgtgaaaagactgttccgcatttaaaggttacgcagttgtgtaggaacgacagcgatatggcttctgtagcaggtaacgctagtaatatctcaccacagcccccgtcgggcgttccaaccggaggggaatttgtactgatacctaccgcgtattattcacagctgttaaccgggcagactaaaaatccgcaggtatcaattggagctccaaataacggacagtatatcgtcgggccatatggatctccacacccgcctgccttcccacctaatacagggggttatggttgccctccgggacacttcgggggaccgtacgggtttccgggatatccaccacccaatcgtttggaaatgcaaatgtccgcatttatgaacgcattggccgccgaacggggtattgacttgcagaccccgtgtgtaaattttccagacaaaaccgatgtccgtcgtccaggaaaacgggatttcaagagcatggatcaaagggaattggattctttttatagtggggagtctcaaatggacggagagtttccctcaaatatatattttcccggtgaaccaacgtatataacgcatcggagacgtcgagtttctccatcatattggcagaggagacacagagtttctaatggtcagcacgaagagcttgctggggttgtggcaaaactgcaacaggaggttacagagctaaaatcacaaaatgggacacaaatgcctttgtcgcaccatacaaatataccagaggggacacgggatcctcgaatatcgattttattaaaacagcttcaaagcgtttcgggtctatgctcatcccaaaatacaacaagcaccccacatacagatacagttggacaagatgtaaatgcagtggaggcgagttccaaggcccctttaatacaggggtccacggcagacgacgccgatatgtttgcaaatcagatgatggtggggcggtgttaaccaacaaataaaagtattacattcataaaaggcgtgtttggtttttttttttttgttaagcggtgtcgtgttaaacaaacagaaggcgtttttatgggtggtaaggttttatttaagttaaatttaatcggtgtcagaatcttcatcccctgatgatggttgttctcggtctggaataatatatggcgccatccatttttcctctggggtatccggaaacacacgcgggatgcaaacccatcgacccgttataatctccagtgccagtgaaatatgacggccccctggacatgtgtttaagtagtcgtattggctgtcgcggttaaggcgaaaaggtttcgttgcacatgctcgacaggttagctgtcccacagaacatacgtctcggggtgtaccgtcgcggggtaattgtaccggcgtgtgttctaacctatcttcataaatcgcggggggagaatcttttactgtttcattgagacttgaagcgcactgtttggacggatgatgtgcgatagacgacggttgttgtagcgcgttaatgttagacgattccataataaccccgttaagatatcgggtgcggtagaggtacaaaacgcgttttgtatattatcgggtataaataccccctgtgatgcgtaatggagacacatgagtaacgtaatacacatttttattaataaattaaaacaaaccccctggctatttacacccccgttacattctcggtgcgaacacgggagtatcctcggcgatttcgtaaagcaaggccggtaagacgtgaagttaaaagggcgctagtcttattttttttgcgggctttagattcttggcgctcagccgcagatactaacgtcatatatttaatcatttcctgggcttctcgaaatttatcgggatcaaacccgctatttaccgacggttcagtgttttgtgagtcgccaatttcttctattggggtatcagtagcgttgggtttctcggcaaagggatccattccttccggtaactgttttaaccccttggttgtgagtggatataatgccttcatcgggcttgttttaagtttaagcacgtaccggtacgcaaaaaaggccgctaccagtcccgccaaaaccaataatcccacggccaatgccccaaatgggttagataaaaacgtggtaaatccgtgtacggtggaaagcagcgctcccgtggccccaagaaccacatgtccaacggcctggcccgcggtcccaagtccctggaaaaactgagccatgccctgcataatggccgttccgctatcatattgcacaaccttgtctatgtcataaaaacgcagcgaatgcatttgatttcggcgttgaatttcactgtagtctagtaatcctgtatcccgcagctcgtctcttgtatatacttgcagcggcataaactctctatctttaagaagtgttaagtttaaatctacgtaagtgctaatcattcccacatcatggactgcgatttcacggacgtaacgataatcctcataatatacgtagtgatgcccaaatagaaaatatcgcttgtgattagccacgcatggttctaacagatctctggacataattaactcgttatctgttccaagctggccctccaccgtcccggacccatttaaactaactattgaaattaaaggacggctataacaacgcgtagtactaccagataccctcatagagttttgaagtataatgcgtgtatctgatcccagttctggacaattagaaacggagataacgtcgccgagaatacgagctttaacacgttgatccaaaatggtgctcgctaaagcacttgggttaattggaaatagtccgctccaaagggcgcgttcgcgattttgtagctggcaccacgacgaggagatacgtgccaacatttcattaacatgctcttgaatgtggtcatatgtaaactggagcatagcaaattccaccgatgaggtggttgttattgttctattggcacgcaactcaactggcacgcttcgtcgggatctggtatttcgagtcgggtgtttttgtggtgaatgattagtgttttcacggaccaattcttggagatagagacgggcgagggaattgctcagcaggggttgaaacaccacaacaaacccccctctggcaaggtaggtctggatatccccggttctaacatgagatgagttgtatctggttgtatagatccggttaataatagcccgggcttcctcctttacacattgactgagatggatttggttaagattaaactcgtttgtttcacttataaacgtggtagaaagtgttttcattgtaaagcgaaaattgtgtgcatactcatcgcgaactacgtcttcaacctcacgccacttgacaagcgaacaaacttccgttcgttttggcttccagttccaaccaaccgttaaatgaggcgtgactaaaaagttccgcgctgcaggttccagtaatgctctagtgtcaagatccctttgtctataaccctcaaactggtgaaaacgatccattgcataattggaatgttctctgtatgcaccatcccgtaggccaaaaaacggggacatgtatattatatctcccgtggaaagtccaaaactatcataagggaatattgatctggcttcaacttcctcaatgatgcaattcaccgacgtgcccgtcctatatgttccgggggttccggcaaccatgtacgtgtcattggtagtatgccatgctttggatcccacagaattatattttgatgcgattagaggcatatcctgtggatttttatcctcattaaaggcttcaactttgtggttatttcgtacgtacgttgctttagaagaacacttgccaaacttatcaatggtgtccgtgatctctgaaacgggaattggtaccctatccgcatatctattagtaatttgcgtataagaacttccggcccacgccgtgctaacgataacatctttgtaatataccgtcgccttaaacttgtacgctgcaatgttttctttataaacaacagcaataccctctgtaaagtttttaccaaggtgataatccggacatgtccgagttggttctaatcgtacgattgtggagcctgttggcggtgggcagacgtaaaacgtgggttttgtttcggcgtcctgggacttgtgtatagcttctctgatttcatcaccatcgcccagatgagcagaccgggttatatcttctgattgtgtgggctctacttgtaaactctcataaaacgagcttggagagaccgacacaaccgccgtaacaaacatagaaaatatgcataaaaagcataaccacacccccgtaacggaggttatgaaaacgccgggtccgttgaatccggagccagccgctgcattagggtgtatagaagagaaaaaacgtctgaatcgtagattacgacggtattctggtcgatccctgtttctccactttgaataatagccacaaggggacatgtttcttcgtacgttaaataaatgccgtctaagggtccgtgggaactgcctatacctttaggttgagacgtgcacccgcgtggatccttacctagacggtcaacgcgacataaccgcacctccccacaatggaaaacagaggtgaatagtgtggttgcaaacacaagctccctaatatatttccaggcaagtctctgtgcaaaagtaacgccttctaccccagaaaagcaataaaagcccctaaatggactgagaagccagttggaaccaacgacaccgcccataaactttgccaattcctcttttaagtgcggaaataggccaacgttttccacggtaaaaaataaggcggtgttagggggttgtgcaaaacggtgttcatcgtgattaaacaatgggccgttgaccaactcaaaaaatttatgtgtaagtgcaggtaacatagccgcatctactgtatgtcgaactaaggtattccttataaatctatgtgcatcaaaggccgcttcctgaatgcgattgtcgataatacaccctgcctgggaaaccttagctaaaaacacgtttcgtgccccaaacccattttgcatcgaaacaaatgtctgcaataaggcctctccataaacgtttaccctgagtgttttttctagctcttggcgctgttcgcggatacatctaccgaggctggttagagagcgcttagacagatgttcaagatatactcgttttctttccgcagcgtcaatttttgctttggataacaggttttcccatccatgaacagcaaaagttatgctactatcatcgttcagatcacattcggatgctgtagcgctgtcactcgcctctttggttaaatcatcctcacacccaactctttctaaaagttggcgtaaggcggcttcgttatcatgactcgggttagaaatgtgacgcatgagaggcgacgatagatgatgggcataacaggctttaattaatgcttctatctgactgtctggtgaggatgagcgattgccaaccaaaatactatcaattgcatccagagatccgagttcttcagaaaacgccctatcaaagtgtatgggagtttttccaaataacgccaactcaaccgttacggctgtaagttctgcgtgtttttcatgttcgtttaatacatccaaattatcaacaaacacgtctaaagtacgttggggtccttcagtggaattagacgttaaccagaatttaagctcgctgatggcgtacatacaccgaggggcaggtttaaaaacattataagaatcaagcatggtgctcgcaatttcgtatgtttggtcaaacgtatcgttctttgctcccatgggattgactaccgtcttggtttgaagtgttcgtaacgcttcaacggcggattgacgtttgatatccggtacatcagggatatatggtaaacaccgaataatatcgtcaacatccacgttaacccgaacttgcttagtaacgtgatcgcagatacatcctaataatctacgatgtaaggtctcaccttggttagctgttatacataattcttcaaaacatatagcacatggatgcgccggatcaaacaactccacgggtggtattagaccgcttcctatagtatctgtcataaaccgcgtcacggtttccaatgtgtttagcgcctcacgagaagacgtgataatatagcagtaattaagctgttttaaaaaattctcaatgtcgtgtaaaaactgaatttcactcgatacgtaacctccgtatgttgttaacgacagctcatggtgatattggcaggtttttaagttaaacgctgagacaaagtaatctttgatacagtttgagtctttagtctcaccataaacaaaacgcgttttaaaatgttgtagcaactcaaacaaacgctcaccttctccctttacataacataatgcccaatgcagtgcacaaaccgtgggagtgtttccaaattttagctgggtattaaatccccggagaaacagctttaataaataacgaactgtcaaacagttagccgctaaccgatataaaaagcgacacgccacccttggatcacatcgacgtagcagttcaacctgaaagatgtacgtataaacttgacccagtagaaccaacaatgttcgattaatatccaattccatgttatcgggctgttactgtccactggactgtaagctgaatggttggagacacactatattacaggtcatatgggtaaggactacacacaaaaaaagaaaacacaacagaatatgtaatattgacttgtttattacgtacactcacccgcgtgtgggctttaattggataaagagggaggttaaatcatttccattgtaatgttcccatgttttatgggaataccactaagatcaaagagttcgtcatcttcggggggtcgtttaagaccagggacagttgaccctgaaatgtttgaccctgaaatgtttaatacgttagatgtggtgtcatggcttggttcacaagaatcaaaattaaatgctaggtttgtgggggtttccccatctcccgctgtcgttttttcatctagaatctttactgcttctagagcgccttctacggtccagggcgtttccagggtttggataatctggtcgtgtaactcctccaagtctctggctaaaaactcatcgtctgtaagacttaaccagtcgtcaaatgccatatgttgtgctcgagcgcccactgcacgcacaaccgtggcgtatatggctaattgaaccatggccccgccactgacaattataccgcgaacttggtcggatagggtggtttctcgatttcccgacgagggacctgttacggggcagataaaacctcctctaggacatgctattataaaacggcgagtgcgatcaaatgtaaatagcgggcatacatttttacccccgtttaaaccgctccaattccctgcctgaaagacgcggttgtttcctgccgctccgtgatatttactaatgcttattcctaaaacgaccatgggacgttgattcatggccgcgcggactaaatgagttgaagtaaaagccgtagtccataattccggtaagttttccgttttttcaagaagcgcctttgcttgggtttctatgtccgcggcggacgtgacatctttacgaatccaatgcaaaacggatgatgggtcacgcgggcgcctggcacccgtaattatagaagttaaggtatttataaggtactgtgaatgatcgcagtatttaagaataagatttgccatataaaactgggctaattctcctatgcaggttgggggtagattaataaagtttattgctgcatattcctcggtaaaccgtttaacagctgcaatagtggtaatctcttcgtgtgtaagtttatctgccggcatctggttgcgttgtaacagggtccaaaaccactgcgggttgggggatttactgtttggtggcataccccgaggaaataacaggccgtgaaactgtttaagcaaaaaccctagggccccgtgtaacatatccactcttttttcttggcgttggtacgcacttgcaaggcctacaagccttgcccgggctgcctcagagagatttgtacagttacctgaaaaaacgaccctatttttaactcgtatatcccgaataacttccacgcttacgcgcgctaaatccccatcaaaggtacgccccgcgggcgcgtcttgtcccaatgtcggatttggggcggatacaggaccttcagataatgttacggttatagagcgtgttgatataaaccccccattaaacaggtcaacaaaacgccgccgcaaaacaggttggaattggttacgaaagttccgcccctcaacttgctgtccgtaaaatacacaatgacattggcttaatgctaagtcttgtaccacggctaggtgtgttcgtttaactaaaaaattggtaatgggacaaaatgctcctgagtatggatcaaacgttaacgccattgaatgggtggcttcggataatccttcacggatcttataatcgcgggtctcaaccaacactttcataaattgtgttgttgtctgttctatacgcgcacgcagtgtgtctaatatgcgacgaaacgttggatgatccacaatgacagacgatagtccctcggaagaacatggggcaccgcgatccagtagtcgctcttgttctagatcgataaacaagcgttctagtgtagccctataagtgtcctgcatggttgcctttgctgcttccgtttgatccccgggttttcgaaggattaaatatggagcatagtttcctagaggatcgcagtcgctatattggctgttcattgttccaaacaccccaataggttgacgggtggcttgtccaaatcgcggcatgcgttgtctaagtcggtgtactgttgtgtgagcgcataccggccgcgtgtgtttttcacataaactacatggaatttcagagtcaaaggtccccgtaacatattttaacgcatccccgtgaccccctgtaaacgcaccagcgtcacagcgttctagataaaaaagcagtcgcgccaacaggggtgctccaaatccacaaatgagtgccaaataatccacgctaaactctgtgtttgatgaacccgtagactgactggatagaacgtggccatctcgatctgtttggggattcgcagctaaatgaggtccggcaaactggtaaaatcgattaaatgatggacccggtcccccatccttggcttcggtcatcccgctatcctccacctcagttagatacaacgcagaatttgggctgaaaaccatcgcaccaatgaccccggccacacgagcggtatatgaccccagagcgtttagccttggcaaagtgccctccatgcctataaacattggccattctttgatatctgttggagtttcttcgtaaattccagtgttgaatataacttctgcgtgcaaggctgtgtcagcggccataatagacgccaaccgtctttcaaacccccccgatgggctaggcttagacgtggagttgacatcgtttcgacgcgctccacgggcggtagtggttccacttgaagaggactgaaaatacgtgtacgtaatgtcaggggggagtactgccccctcgtgattttcatcaaaagcaaggtgggccgctcctcgggcgacggcagttacatttctgacgcgcaaggcaacggccatgggagcaataacacagtcatgtattaaatggcacaacccggtgttataaaagggtgttgggtatacaaaaccctctccgatagacctgtgatgagtgttgaatgggtcgggtaccagacggttaacatcgggcatgaaaagttgtaccggaaataacggtatacgtataacatccccatggttaatatgaacaatatcgagtcctccataatgcagaaacacgttgcacataaatacggcttccttaaacaatgccgtgaccaccaagtataatattgtattttctggctctaatccaaggcgggtgcatatctcagcgccggtcgtctcaacagcaccgtcaacaggaggcccttggcagcgtgaaaacccaaaccgttctcgagccgcgttacacgcgcgtgtgagatttggggccgcggagctgggtaaaacgtgtttgcctccgtgaaagacaaagacagatggatagaaatgactggtagtgagttttaaggtaataccagctccggcaagacccgtagtgcgtgctccagaaaccaccgccaggctggatgtaaaagttttttccacggtcaaattacgcatcaaaggtaataaagccaaatcagagtccgtgctacgagcggccaaaaatgaaatttcctccagatccaaatcttcaacccggcacgcataaacgtaacccaggggccccgtgggcactgtcacagtcttctgagtattttccattttggtgaagtactcgtaataatggggggttgttggcagggtcaaatgaccacccaaaacccagtctgtcgatacattaagaagagaggcttttaaacgggtattacatatgcggaaaccacaacaaatcacgtgattacactttatgtattagaagggcgtggggttgtgttactcagtaacactggctttttacaagattatcaatcgttaacataaaatggcgatcagaacggggttttgtaatccctttttaacccaagcatcagggattaaatataacccaagaaccgggcgcggtagtaacagagaatttcttcatagttacaaaactaccatgtcatcgtttcaatttttggcccctaaatgtttagatgaagatgtgcccatggaagaacgaaagggggttcacgtcggtacacttagtcgaccgcctaaagtttactgtaatggaaaagaagttccgattctggattttcgttgttccagcccctggcctagacgcgtgaatatttggggggaaatcgactttcgtggggataagtttgacccccgctttaacacattccatgtatatgatattgtcgaaacaacagaagccgcgtctaatggagatgtatcccggtttgcaactgcaacacgaccgcttggtaccgttattactttacttggcatgtcccgatgtggaaaaagggtggcagttcatgtatacggcatctgtcaatatttttatataaacaaagccgaggtggataccgcttgtggcatacgttccggtagcgagttatctgtattacttgccgagtgtttacgcagttctatgataacacaaaatgatgcaacgttaaatggagacaagaacgcttttcatggtacctcgtttaaaagcgcatctccagaaagctttcgcgttgaggttattgagcgcacagatgtttattactacgatacacagccatgtgcgttttacagggtgtattctccctcatctaaatttacaaattatctttgtgataactttcacccggagttgaaaaagtatgaaggtcgggtagacgctaccactcgttttctaatggataatcccggctttgttagttttggttggtatcaactaaaacctggagttgatggggaacgtgttcgagttcgaccggcaagtcgccaattaacgttaagcgacgttgaaattgactgcatgtcggataatctgcaggctataccaaacgatgactcatggcctgactacaagttgttatgtttcgatattgaatgtaaatcaggaggatctaatgagctggcgtttcccgatgcaacacatctggaggatcttgtaatccaaatttcttgtctattatattcaatccctcgacagtctttagaacacattttactgttttcccttggctcttgtgacttaccacaaaggtatgtacaagaaatgaaggacgcggggttaccggagccgactgtgctggagtttgatagtgaattcgagctattaattgcatttatgaccctcgtaaaacagtacgctcccgagtttgccacaggttataacattgttaattttgattgggcgtttattatggagaaacttaattctatatacagtctcaagcttgatggttatggcagtataaaccgtgggggtctgtttaagatatgggatgttggcaaatccggatttcagcgacgaagcaaggtaaagatcaacggtctcatatctctggatatgtatgcaattgcaactgaaaaattaaaactctcgagttataaattagattcggttgcacgtgaagctctaaatgagtccaagagagatttgccctacaaagacattccgggatattacgctagtggaccgaatacacgaggaattattggtgaatattgtatacaagactcggctcttgtggggaaactgttttttaaatatttaccacaccttgagttatccgcggttgcaaggctagctagaattactttaaccaaggctatttacgacggacagcaggttaggatttacacctgtttattaggactggcttcgtctcgaggatttattttacccgatgggggatacccagctacttttgaatataaggatgttattcccgatgtcggggatgttgaggaagagatggatgaagacgagagcgtttctcccactggtacgtcaagtgggcgaaatgtaggatataaaggagccagggtttttgaccctgatacgggattttatatcgatccggtggtcgtattggattttgcaagtttatatccaagtataattcaggcccataacttatgttttaccacgctaacgttaaattttgagacggttaaacgtttgaatccatccgattatgccacctttacagttggaggaaaacgtcttttttttgtgcgctctaacgttcgagaaagtctgctgggtgttcttttaaaagactggttggctatgcgcaaggctattagagcgcgcatacccggaagttcttcagatgaagcagtgttattagacaaacaacaagccgcgataaaagtagtttgtaattccgtgtacggttttactggagttgcgcagggatttctgccatgtttatacgtagcggccactgtcactacaattggccgtcaaatgttattaagtaccagagattatattcataataactgggccgcatttgaacgttttattacagcgtttccagacattgaaagtagcgttctctcccaaaaagcgtacgaggtaaaggttatatatggagatacggattctgtgtttatccgattcaagggtgttagtgttgaggggatagctaaaatcggcgagaaaatggcacatataatttcaacggctctgttttgtcctcctataaagttggagtgtgaaaaaacttttataaaacttttgcttataacaaagaaaaagtacattggggtaatttacggcggaaaggttttaatgaagggagtcgacttggttagaaaaaacaactgtcaatttattaacgattatgcccgcaaacttgtagaactgttgttatatgacgacaccgtctcgcgtgctgcggcggaggcgtcgtgtgtttccattgctgaatggaatagacgggccatgccgtctgggatggccgggtttggacgcataattgcagatgcacatcgccagattacatcacccaaattggatattaataagtttgttatgacggccgagcttagtcgtccaccatccgcctacataaaccgtcgcttggctcacttaacagtatattataaattagtaatgagacagggtcaaatcccaaacgttcgagaacgcatcccttatgttattgtggcccccacagacgaagtggaggctgatgcaaaaagtgtagctttgctacgtggagatcctttacagaataccgcaggtaaacggtgtggggaagcaaagcgtaagttaataatatctgacttagcggaagatcccattcacgtaacatcacacgggctgtctttaaacattgactattatttttctcatctcattgggacggcgagtgtaacttttaaggcgttatttggaaacgacactaaactcacagaacggcttttaaaacgttttattccagagacacgagttgttaacgttaaaatgctaaaccgcttgcaggcggcaggctttgtttgtatacacgccccgtgctgggataataaaatgaacactgaagctgaaatcaccgaggaggaacaaagtcatcaaataatgcgtagagtcttttgtattccaaaagcaattctccatcaaagttaaggtcacacattttacagtaaacgtccgatgttccaatggatggcaccacagtctctgtttgttgttctgggttgcgacataccgacagtaaaaatgttgtctgccaaacgtgtgcgactattttatacccccgacacgcggcctgtatatgatcgattagtctgtaatggaggtgaacagatttccccggaaatataacatacatcataaaccctccggcatctccatcacgataaaaaagtacgcgtatatctcgcatgcccccctccctcataatatgatacataaaaaataattccggttgtgccaatacgctcgacaataggggttcagcggacgctgcttgcatgttggctcggtctgatagcgccaaaatggatgcaagaaacacacgatattcgtatatgttgttaagctgctgaacatatgctagtatcagagccgcccgatcggttcgacatagacgcggttctccagatgcagtgcatgtcggacaataacctccgagacctaaatgataacccattccggataacgacaggcagttatccgccactgtctgacccaagttaaacggaagggtgacaggggtcgtcttaataattggcacgattaagcctctaacggtagctagttcttctgggggggaccttgcgatgtaattaaaataatggcggtacacagaccgctcctttgacataagttttcctcgaatggtttgacggcggcatggcgttctggagcgtacacgcatcgaaggcccgctccgagatacggatttatatcgcctagacatacttcgatagggtgtgttcgagggagaccagcgatattgcatgtcgtcgaagcataagtcctccatctcgtatgaatgcggcattggcggttggtttgcgtggaaaaatctggtaggctttaaatgcatacgccaatgtccacaggccagcacatacacgaccttcaaatctgttttgtgcagccagttgggctttatataactccaacacttccttatccgcggttgtaggatgggcaaataaaattttagggtttgtctgtaattccgagagagcgcataggagatcgcaaaataaatgtttatatacggcctcggaacctgctgcttttacaatggttatgaatcgaccctcatcattaaatggaaatttaagtttaatggggttatctaggctccatgcattgattacaggttcgatacagtcaaataaacttgtgttatttgctgagtatgctaatatatcccttttaaactgccgcaaagcgatccaatagtgccctatggttaataaacaacataacatgcattcggtattcgtgcgaccacggcactttgcgttttttaaggtagttaacaaaataggcccaaatgctacttcgggacaggcatcctcgctcgtaaatttggaaaattgttttggaacgtccctggagttttcaatccggttcgcctgccagtatgatttaacacatccaacgcgagtttctatagcacaatttgtacgctcgtctacattccaagtagcaaccccactcagtaataataaagccaagtctgcgtaaccccaagctgcttctacgtaagacgattttttaagtttgtctattaatatatcttcaaactctatatcctcttttaatgcacgttccgcgcaggtaatcatcccacttgtgcgatgttccgatgatgaacagtcaaccatccgcgcgcaatctttccaattagccaaggcggccgctaaaggttgagggcctccagtcagtccgtcctgattaaagtaaaatgacttacgcgtttcggtttcgtctaaacgagacgtgctgatcgatagtaatgcagccctaactaccgcctgtacaaaaaaggagtaattggaatatcttactttgttggccatttccttaccggggggcggtcgtatacctggtaaccctccatcggtacgaaaacatacatgcaaaaaaaaatgtctttgtatatctaacagggaaagcgtgcgcctggcaaaggacccaaccaaagtaacgttataacggcacaggtagtaacgatccataagatacacaaattcaaaggcagcgctaaaagtgacaactgcacagggcggggatgccagacttttcatacataacatggcgtagtccgcaacccattccggtgtcagtccaaatttacgtttatacaaatcaagcgttctgcagaccaaacaggctctgtctaacgccaaaacgtctccaatttcttctataaattcagtggtacttgaggtcatttcattatccacacctaccgccgaagaggcctcataagtgacgttgttttctattgcacggggaacatttattaagtgggaggcaaataacaattctgaaaataacaaatcgttttttagcagaagggctggattataagcgatgtacgaatcggaaaatgcgtcggaacaccatccggaattagaagatgtattttcggagaatacgggcgattcgaatccatccatgggttcttctgattctacccgatccatctctgggatgagggcccgcgatttaattacagacaccgatgttaatctattaaatatcgatgcactggagtcaaagtattttcctgctgatagcacctttactctttccgtttggtttgaaaatttaattcccccggaaatagaagcaattctacctacaactgacgctcaattaaattatatatcatttaccagtcgcctggcgtccgttttaaaacataaagaaagtaacgattcagaaaaatctgcttatgttgttccatgtgaacatagtgccagcgtgacccgtcgccgtgaacgctttgcgggagtcatggccaaatttctagatttgcatgaaatattgaaggatgcttaatacatggggaaaataaacgcattaataagtcgtcagggggtggatcactccaaactcctcctatatcccacgataaatggtctaaatacttcacgcgtgtgccttggtttgcaaccttagatcaatatgtcacggagaacgtatgtacggagtgaacgcaggaggggttgcggagataatcttttacaacgtattcggttggtggtaccaagcgctcttcaatgttgcgatggggatcttccaatatttgatccacaacgcccccccgcccgttgtgtttttcagtttaacggcgaagacaacgtatccgaagcctttccggtagagtatattatgcgtttaatggcgaattgggcgcaagtagattgtgacccttacataaaaattcaaaatacgggggtgtctgtgctatttcaaggttttttttttcgtccgactaacgcaccagtggctgaagtgtccattgacagtaataacgtgattcttagttcaacgttaagtaccggtatcaacctatctgctttggaatcaattaaacgaggtgggggtattgaccgccgacctctccaggctttaatgtgggtgaactgctttgtgcgaatgccatatgttcagttatcctttcgttttatgggaccggaagatccatctcgcaccattaaacttatggcccgcgccacggatgcatacatgtataaggaaactggcaataatttggatgaatatatacgctggcggccttcattcagatccccacccgagaacggaagtccaaacacgtctgttcaaatgcaaagtgacattaaacctgcgttacccgatacccaaactacgcgtgtctggaaacttgctctacccgtagctaacgtgacatatgccctgttcattgtaattgtactggtagttgtattaggggcggtgcttttctggaaataaattgcctttccgtacatatcctgcgcagatgtacgtgtatgctgttatcgattgtcccgtaaactaataaacgatgacacaacccgcatcgtctcgtgtagtctttgatcccagcaaccccaccacattttcggtggaagcaattgcggcttacacccccgttgctttaatacgacttttaaacgccagtggacctttgcaacctggtcaccgtgtggacatcgctgatgccagaagcatttacaccgtgggagccgcggccagtgccgcgcgtgcacgcgctaaccataatgcaaatacgatacgccgaacggccatgtttgccgagactgaccctatgacatggttaagaccaacggttggcttaaaacgtacgtttaacccgcgtattatacgaccacaacccccaaatccatccatgagtttgggaatctcggggcctactatattgccgcaaaaaacacagagcgccgatcagtctgctttacaacagcccgccgcgttggcgttttcgggatcatccccgcaacaccccccacctcaaacgacgtcggcatccgttggacaacagcaacacgtggtgtcggggtcttctggacaacaaccgcaacagggagcacagtcaagcactgtccagccaacaaccggatcaccgcccgcggcccaaggcgtgccacagtctaccccgcccccaacccaaaataccccccaggggggtaagggacagaccttgtcacacacgggacaatctggaaacgcttcaagaagtcgtagggtgtaaataaaaatacacagaaaataatcgttgttttttttttttctttaataggcgctactttatatatatgttccatctaataacaatttaacataccccaggccttgaaatatatcttccgtgtggtccattaaaagtttacgtgtatatctaacgttgtcgatcatacgccgacatgcctggcttaacagtgccagtgctcccaaggcggtccctcggacataacgtcgaccggtgactacatcggcattaacaacgcgtacgtgcctaggaacgcgacatgaccgatgttcgtcgagacttagtacgatagaattttcactctcactgctatagccgtcagaaggttcactaaaatcactttgatataggtctctgttcggtgagttaaacgggttagaagatacgccccatgtgtgtacgtcccgcggaaagtttggcgacggctgtcttgttttatagtttgtcaataggtccgtttggggggcatcggctgccgtgtcaacccaagaaggtaattggttatttacagggtggaatactgttttggagttatacattcgagggtcattttgatgccgtttttgtgtttgatttgatttttcaatccaagtccggtaagatatcgagtcatctgtcggaatggaggtaatctcaagtattggtttactgaacgcttggtttaacgtttggttttgctgtggattatttttccaatccgacaattggttatttggtggggtaatacttttacaaacggttgttttaatggaggtggttaattgcttaggtataagcacagccgtttctgattcggtttccacatacaagggaatatctttttggctaagggttgtttttacgctttggggtttcttaaaattttgtaccactatttgtgtgcccggttctatgggctgcgcgggctggacggtctgcgcgggctgcgcgggctgcgcgggctgcgcgggctgcgcgggccggacgggcatttttttacatttggaacttctaacaacttgaacgggagacttaaatagtggctccgttgggtaaaaatcagttgtgtcgaggtttggggggccttggggcgcataaccggcaataatttgcgagtaaaatggatcatcgggacacgaggggaaagagtcctcatcggagtcgatgtacggcaaatcaataagagattctggcccccaaaagaccacataatccggagctggaatcgagtcttttcgttcccataaaacataagagggattcatatgttcgtccaatagcagtaaacacgggggattgtttgtaagaggtttgtttgcaatgagcgcggacagtttttctagttggacaattaaacatgcattttcaattgggtgaggatccatatgcagtaaacgtaacccccaagaaacaatatcgggagatacggctgaggatatacccgaatctgtagccatatgccgggaatcgaataattttaaccccaaagtaagtccggaattttgtgaaaaaacggatgtaagttccatggcaataaccaaaggagccccaaataaaatagccgtagttgctatgtcaaacgctgttacattagaaacgtgagttggtgccgcccccgttactgtaaaaactgtcgttgccccggtttgaatataagcatctgtaattactttacggtctgtattccactctaacgtggtattgctgggagcggtatcaaatcttgcattaagcgtggatgacaaatccagtctcgcatcaactataatgtccacatcatcttgtgttctgtatgcgaattcctccggttgcagcgtattccacattgacactaaggaaattggcgggagacacatgcgcccaagtacagtaatggtcgcaagacgatctgttgccattatacgggtaactgcatcgacattggcctttaccccgggggggggggaaagttgccatggcgcaaaaggatccgttattttctgtggcattttaacaagtttccaatctgccatccgaaatgcaaatattctcccgccggtaggatcttggtttgatccaagagctaacgggagtttatgtttggatggggcggcattaaaaaaggcccgggcattgcctttcgggtctccatccaatgagcgaacgagtaaacgacctctaaatgcggcctcgattacgggtctgagggtacgggccatatactcatgctgtttaattaaatccaatctagcaaaattgagaagatgtaccggggttgtggcaaccaaaatagttacaatatcagatagggttaactctaatacgcgtacatcaccccttctctggattggtttagttagtccattgcccattacagaagttaggtggtgtttttcaaaagaataaataagcttgtcccaatgaaccccgtattgtcgtgtcaatgttgttgttataaggccggcgtatatctctgcaatggctctgcgtgcgttggttttaccccattcggcgtggcgatgcctaacaaaggtggaaaaggcagaaaacccggattttatagcggattcgtattcaatgcgtagctcattgacctcattggccacgcgtaatgccgatagtgtagtttcttccacaataccttcatcgggaagtgccggtcgtaaagataatccaccctgactgcatagcatggttccaagtttaaccccaactgatttataacacactctatatcgaagtggaaccccatcagtatccaagtaaaaggttaaattttttccaaacaaagcgtctatagaagatctggcttccctaaacgtttgcaccacagacgcctcccccataaacgcggccacccgcgcgcgaatgcatcgggattggtcttctagacatacacccgacatggcgggaataggagcaaatactccgtttggagacgcgggtggaaaaatctcagcataacttgcatacaagcctaaccgtaccatgagtaaatttcgaaatgtcatatactgtgtttttatccatataggcaaatgtgtaaattgatcgaaatcacgtaataacatacgaagaacgtcatggtcactctccgttggaatacgttcaattaaagctcgtaagcgagacgcggtctcttcaaactgtctttgtttttgcaacacaacatccaacgccgttttacgttcctgttgctttttttggagacggtttttcgtttccacaggcaataaaaaaaattcgggttcggaacaaagcatgtcaaccacagacgccgatgcctggagtgcctttatactatctacggaagtagcgtacgtgtcccccgatgccaacatatcccccgtttctcttttaaatgttgtccatgcatcgtcccacgtaacctcaccggtttctattcgtcgtcgtaggagatctaatttagttcgtaacgcataaagtttatccaccctatctttataagtatgcagggggccggtaccgtctatacgcacacttagtggatgggagtcaataatattgcgagcttggtacatccagtcaaccgcctgaatgtccaacgtaccagtttcttcttccagacgccctaacagcaatgcaaactgcgtgacaatgtcctgaacggaagtagatctatcaatggccaatgcaattgttttgggagggggggttagttttaataacgtcttcaggttagtgaaatccacgtcttcttgttgctcagtggcattggccgtatcaacaatgttttgtaaaatttgtattgcacggttctttgttgcctgacacaccatacgaaactgtgcaagctctgcgttggcctcctttagatcgcggtctaccattgtttgtaaaactctttcatatgccgttcctataaatcgtttatgatcgaaagttgtaaaatactctatagcccgaatcaataaaccttcgcttggtaatgtaatgaagacaccttctttaagtgcaagtttagccgtttcgtgtgcccgaacatgagttacttcctccaaagccttatttgcttctgtaagtttagccccggcagcctgtctgatgtctgctctaagttcacttaacgttacactttcggttataaactgatcataagaccgtgtgtaaaaatcaacatacccagccaatgcgggtatttgtaatagatcccccgaggttcgtaatatcatatctcggtagttaggtattccattaatagacgtatcggcggataataacacaaccgcgcgaatacgcataagcagaaggagtccctcaatactaacacctggaaacataacggtgaatacgggagccgtaatcgaaaaatcatcaaaccatgttaaccctcttaacaaagccaaaggtggtggaatatttgtattttcgggggtatatggattgtggcgaaacacagtatctaatgccgtaacggctgtagtttcacatgccgctacaacctgacgtgcttgtgggtaaactgcgtgtatatcaaaccctcccgcagcggccatatctcgcaaccgtgccagttctgtcccgttaaatatatggcgcgtttccattgcctccagacatgctataatatcacgtgtccaacgctcatacaaaacccgagtcgtttgttgtttatgtgcacgttcacaatcggtaattaacacttttgcctgttccttcttctcatgtgccattgtgacgagtttatgaagatcctttactactcgagataaggtagatgtcccagcaatacaatgggggggtagcttttgcagttcaacttcaacaagtttaaccgtatccattagggcgtgcacatttgtttgtattgataatatcgcatcgtttatttcataatcatctacatttgaagatgatataaacttcaagtgtccagatgagacagctagggtggagaagtcatctccaagttgtttttgtaattcagtcaacttatgggtattcgtaatttcttgttgtaaagcctgatattttttatataacgacaacacaaaggataaggctggcactgtagatgaaactaacgtcgctttactaagagttgcaacaacagcgtttatggcggactcactttccgggttagtagatacggtcgcgatgtcggatgcaagcacatctgccacgtcaccaaaaaacgcaagcaatgatggtctatactccgtaggtatcggcacaatttcgataatagctgtaaaacaagctcccagtcctcctaagacagatgtgcgtgcgtttccgggatgttctaaaatgtctcgatattggttaaataacgcccagaaatcacccgtaagttgagaacggatctctaccggcgcctctaagactttggtcctgagatttaccagggctccttggacatctaactcagaagcaagttccggtaataaatctactgcagccctaagtcccacaaaaccggttaccgggcgaagtaaccccccgagtttattatatgccgcctgttttcgactctttattgtgtcctgtgtggttcgggcctcgtttgcatacgtctgaacctctttaagccttgtttccaatcgtcttttaatcgaaggttgtaaaccggattggatcattggatcacttaaaatttttatctgtcgcaccaaatcgtctgtagcacgtacaattgttgctaataaatcatcccgtgttatttcaggatacttgacctcaccattgttatatgtttcatagtcctttacggcttggtctacggccgcgcttagcgtattaaagcaagacaactctgcttccgcggaagcccgttgcgttgcgcgtgtattaatggttttaattgtacgtgataattcatcgaactctcgtctggataagtaacctgcggtttgagcttccccgactacagataaccacgatacgagagccgtgtctgtgtttaaatcttccccttctttaataagctcttttaacagagatacgacggggagattttgtatagtctcaggaggagggtgtatagacagggacgatatgattgccgttaatttagcgtcgaattccggaagagaatctaaaagccgttgaatgggtgccgtacttgcggtcgcgacccgaaaacgcctaggggattgttcagcgatcaaggcccgtgtgctatataacactccgcgggtgaagtattctgtaacagccgaggtcaatagcattgtaacttcggatcgtatctcatatacacgccgaattaactcttcgggtggaatgtcggtttcttccgggggttcctggggaacttctggtatttgaatggcatcaattttattgcgggtagaccgtaatgcattctctaaagcctttacactagaaacaagcgcggtgtgttcacgcatatagcgtgtctcccgggccgagactaattcacaaagaagacgtattcgttcagacagggaccctgtacgggttggaataagctcggcaaaaagtccgggatgagaaataataggcgaatttagtatacttataagacctgtcgacagtctagaatagaggtctatgggcgacgaacctcctagatccgcttctaacacatctagttcggcatgtaaagcgccggttgtatcctgaacccgcatggcaactagaccaaacttagcgataatgagcatgccaattgtacattttttccggagaacagttttaatagcatattccgcccccggcatgtttgttaatatcaaacttgtaacgcgtataagttccgcggcggagggaaatcctgttaaaatttccccaaggggacctataaagtctgatacaacgcttgtagcaccatgatgtgtacgtgttccattttccaccacaaatcccgttaaacgcaaaatggtgaggttaataaaaagctccaatggatccttttcgtctggcataaccaagggccttgttacccaaatgggaacatttgtatgaccggtaataacagtatccaacgtacccaccgcattttgtacgtatccattgctaatttcatgcccatgttgtagtagtttttcgacaaccatgttgacatcaccactctgttcaaatagaaatggcttccgatctttcaaactgcttcctacattcatgttccgtgaaaaagtgggactggattcaggcgtatctacattggatacatttaacacaacgtctggggtgttagcaacttctcgtaggcggggtaatacatgtgccacttgtgttttatccggcacgtctacagttggtttaaatttgagaacctttttagcgggtttatgtaaattatccgtggaatgtgtattatttaccaagccatcgtcgatacaagctaaattttcctcgcttgaaggaggagtccatgaaggacggcgtctacgacgacaatccaaaacgccagacccagtcgaggttgtttctagaaccgcatgccaaggatcaacctcgctgtaactacatctagggtccagtgcaaccgtgttggttaacgttgaatgtagggttgcttccaaggatacactttcaccaacgttttggtgaagaggtactatagacgatttattaagcacaattgtcgtggaattaggaggtgaaagaagcaacggatgttgagctgtaaccagtttttcgcaatattgttcatctgtaaaatatgtatcacagcttccgtatataagcgttactgccgaagatagcgcttcttcgcttacgggaccgtcgtttgcggtgacaaaaaaaactaatgcagcggcccattgggattctacgttatcggggcggtgggtatactccgatgcgatataagagtacacatccgtggtattcacccgaacaactacagcctgtcctatagtcccatggccatgtggatcaaaaataaaagatatgtttccctgacgatagatggccattcccgttgagtctacagttataattgtatacgactcttcacgtcccatccacacatcatcgaaaaacgctctagcgggaatttgtgtgcacataaaaccctcgtctggaacggtaaaaaaatggctatcgccgtatattctagacaaaacgcagcacgtactggtagtgtcccccagtttaatatatgaaattcgattggggagatcaacaagagcacacatatctgggacacccctccccatattagacagatccgtagtccatgctgcaccctcttgtaaacatccatcaatcatgtctgatgacagggttgcattaattccatgcgcatatgtcatatgcaaaaacgataaagatgttcttaaacatgacagacctgacgccggtcccagggcaccgtcaaattgattacggcttcccactcccgcaacagtgacagctataggcggaattatatccattttattgcttacgaaaattacgcgctcaactggtagggacgctacgtttacgatgattcaaatcccaaagagcgttgaataagcacgtgtagctccaaaaacctaggaggttatgaaaatactagcaacaacagcgttatacaaacgaaacgcccagtcaataaaaaccacaaatactttaatgtacataaacacgcctgttttatattaagggtcactcccacttgtattcccgggtacgccaagacgcaaatctacattagataaaatctcatctggacgaagccatctttgtcctattatcagcgtcggagcctctgaaattacgtctctgaccgttgtcgttattttaacattatcatgtaaaaacgttgcatttacattctcccatgttcctatattacattgtgaagttaaaaccgcgcccatctgaggtccagaatccacaataaactgttgcctggagtccataacgaatgaaactgctgccttgtgatcttccagatttcgggcgtgactcatatatgaggttggggcatttacacgatcctcttgtatattttttaaaccgcgcctcaattcattacacacggttgcaatagattcggccgacgggactgccgtggcatgcctacaagctgttgctattcgttcccacctatttaaaaaaatctctacatttgcaagaccgggtatattttctcctgttgttagtttgtcaacacgcattaaaatgtccatttgatcctgtgtaaaccgtgcataccgggaagccatcgttgaaaaaagaggcccaatagcagaagtggaggttttagtcattaaattttcacattccctaagggctgaggaagcatcggccataattgtgcgcaggctggatattcccactctcatttgcgttcggattccttgtattgtcccaacaatatgaccaaccgcatcagcaagatcgtttaaacgccataccccaaattgttcatcgcgttcaacctttgggttacagataccaacagcctgaagatctggcgttggataaaaacgacacgcaaaaaatttttgtaacattaacatgtaccgagaaaccactaacgcgttggatgtaaaattttcaaccaacgcctgcgatgttttatccagtcgggtccaacgaccgtaaagttcatcataatagagagttgctaaaaaaacgctatttgtaatagaaggacggtcaggaaccaaaggacggacgtgctggggaagcaggtcaacggcaatgccaacagtccgatgaagttcgcatataagggaatctatagtagaaacgtgagatggtaaaagtactggggggtgtgtacgggtaaaaggttctaatattgttataagagcagatagttttgtgcgatatccatctgcattgggcacggttccggatccataatcgcgagcccactgaagaatagacaaggcttgctgtattccccgtgtatcaaaagacaaagctattgttgccgaaagggcatcaagcgtgcttgttgcaataatataaggcacaaacgacggttccacaaacacgctagagcgattatattcggtaggatatgcaatctttagtgcttctgttatcatgacagcttccaaccctgtagccggtggatcaacacaaataggaggtgtcatacccacatccaccgggggagtaataccccatcttgaatccatacgtaggtcaaaccaggttagtacggcttcgcgtacggcactttgtcctgcttgtggtaataacgcacctgaggattgattatgtgtttgcttaaaatatgttgtctctctagcttctgcatgtgaaatttcattaagtagtattacgcgtgtcgcttgtatactttcaataaggggtcgtggagcaaaacagcgccgcataatttgtcccaggcctcccggtggtaatcctaaggcgggtaatagcgtttcataccgtttttcggtctcgtttactgtccgtgtatatgttaacacatactcggtagtaggagcgtacgtttccactaattggtatgccagtccacccactaaagcgagacatcctagtgtttgttggaaatctgtaatatgctcgtctgctacaacgcttccgtgaataaaaccggcgagtgtgtggtgagcaataaaccgacgtagcaatttgcatgaaaatcttgtaaacccggattcggcaagggtgcttattaacatactaggcgatgtactagcctgaaccttttcccaaatgccacgggtgtgttctgctacattacttccagatgtggtttccgcttccgggtcggagtttagtaaatgtaacagcgcctcaatatgaattccgggggtggacaacgataagaggttgctttcccatataccattgtctaatctaagtctcctagcaagcattcccggggatgtctcaaaaacataagggtctcgataagccagagctgaggaaattcgtgactcgtgcaccgttcgtggattcgttaccgcttcttcgatggatacgaacgcctcatctttaattaaatttacagtatctgcaaataattctgatatgctatgtactggcgtttccgtgagatattcatcaatcatacagattataaaaagggctcgtgttagaggagtgagtgagctattttgaatctgattccacataacattaaacggaagaagccatcctgcatattgtgttaaaacacgaatcccctcttgaacaaatggcatatcgtaaatgatcgcaaatttatgttgtgttaaagctgcaatggcgctttccaacattccaatacgagcgtgagtgaatggtgattcaatggctgttgttgcatcctttaaggcgacctcgtacatatttatccagtccgttataatgaagtgtatcgaaacgggtccaaatttagacgaggttcgtaatttattggccgataaacgatgtaacgtctcggaatcttgtactacacttgatagctgggttaaaatttttaagctattacctggctcctctatcgtccagtctagatctagtctccaaaacaacagtccgggtaaattttcggccgtgaaagcagcctccgccaaaaatgtattggaatatacaaaacagatattagaatgcaggggttcccatatctgaataaaatgtttagctggaattttctgggtagatcgtaaaaacttaactaccttaactctggcgatttctgttttctctggtgaccatggtctttcgttgtccgcttcttgtactttcaagttacttaaatcatccaaaagtttttgtgtatcataacaaattggttcttccatggtatattctacgctgacttaactttataacgtgatatgaaaaagctacatccgtccggaatgaaaagacataaatgtaacatcaataaaaacgcatgttaataaaaaggacgtcacggtaagttgaagaaccttttaacgccaatcaaaatatttttataggctcctcctacctaacattatataaacggtactacgactgtataatgtgtacacataccccaggcaacatttcagatagtaccacgtcacgattgcattgtgtgaatttaacccctcagctatggggagtcaaccaaccaactcgcattttactttaaacgaacaaacgctatgtggaactaatatcagtcttttaggaaataaccgttttattcaaatagggaacgggcttcatatgacttatgctccgggcttcttcggaaattggagtcgcgatttaacaattggccctcgctttggaggtctgaacaaacaaccgatacatgtaccaccaaaacgtacagaaaccgcgtctattcaagtaaccccccgttcaattgttattaatcgtatgaacaacattcaaataaatccaacttcaattggtaacccgcaagttaccattagactcccgttaaataattttaaatcaacgacacagctaatccaacaagtgtcattaaccgatttttttcgtccggacattgagcatgctgggtcaatcgtcttaatccttcgtcatccatctgacatgattggagaagctaatacacttacacaggctggacgtgaccccgatgtactactagagggtttacgaaacctattcaatgcctgcacggctccttggaccgttggagaaggtggggggcttagagcatatgtaacgtcattaagtttcatcgccgcatgccgggcagaagaatatacggataaacaggcagcggatgccaacagaacagcaattgtttctgcctatggatgcagtcgtatggaaacgcggctcataaggttttcggagtgtttacgtgcgatggtacaatgtcatgtatttccacatcgatttataagtttttttgggtccctgctggaatataccattcaggataatttatgcaatataaccgccgtggccaaaggtccccaagaagctgcacgtacagacaaaacttcaactcgcagggtcacagccaacatcccggcctgcgtattttgggacgttgacaaagatttacatctttccgcggacggactgaagcatgtgttcttggtttttgtatatacacagcgacgccaacgagaaggtgtaagactgcatcttgcattaagccaactaaacgaacaatgttttggtcgtggtattggcttcctgttaggacgcatacgagctgaaaatgccgcctgggggactgaaggggttgcaaatacccaccagccatataacacaagggcgttgccgcttgtgcagttatccaatgacccgacaagccctcgatgtagtattggcgaaattacaggagtaaattggaacttggctagacagcgattgtatcaatggaccggcgattttcggggacttcccacacaattatcctgcatgtatgcggcatatacgttaattggaacaattccatcagagtctgtgcgttatacaagacgcatggaacggttcggaggttataacgtgccaactatttggttagagggggttgtgtgggggggtacaaatacatggaacgaatgttattattaaagcatgtatgtaaaataaactgaatttaacatagcgtgggttttgcgtgatattatatactggggaggggcaggctgtacgtaaccatatataagggagtctacaatattgtagaactaactcagctgtgagtttagggtttaaaggtttattccggagcctaaatacgttatccgttatggagttcaaaagaatttttaatacggttcatgacattataaaccgattatgtcaacatggctacaaggaatacatcattccgcccgaatcaaccacaccggtggaattaatggagtatattagcactatcgtctcaaaacttaaggcggtgacgcgacaagatgagcgagtgtaccgatgttgtggagaacttatccattgccgtattaacctacgatccgtttccatggaaacgtggttgacttccccaattctctgtttaactccccgagtccgccaagcaattgaagggcggagggacgaaattcgtcgggctatattagaaccgtttttgaaagatcaataccccgctttagctacccttggactacagtctgctttaaagtacgaagacttttatttaactaagttagaggaaggtaaattagagtcgctttgccaattctttttaagactggcggccaccgtgacaacagaaatcgtaaacctgcctaaaatcgcaactcttattcccggaataaatgatggttatacatggactgatgtctgtcgggtatttttcacagcgttggcatgtcagaaaattgtcccggctacaccggttatgatgtttttaggtcgagagaccggggcaacggccagttgttatttaatggacccggaatccatcactgttgggagagctgttcgagctatcacaggcgatgtgggaacggtattacaaagtcgaggtggagtgggaatttctctacagagtctgaatttaatacctacggaaaatcaaacgaaaggtcttcttgcagttttaaaacttttagattgcatggttatggcaattaacagtgattgtgaacgaccaactggagtttgtgtttacatagaaccatggcacgtcgatctacaaactgttttggccacacgtggaatgttggttcgtgatgaaatatttcgatgtgataacatattttgttgtttatggaccccagatttattttttgaaagatacctaagctatctaaaaggggctagtaatgttcagtggactctttttgataacagagccgatatccttcgaacattacacggggaggcattcacttcaacctatttacgtttagagagagaaggattaggcgtttcttctgttcccattcaagatatcgcattcacaatcatacgcagtgctgctgtaacaggaagcccctttttaatgttcaaagatgcctgtaatcgtaattatcatatgaatacccaaggaaatgctatcacggggtcaaatttgtgtacggaaattgttcaaaaggcagacgctcatcaacatggcgtatgtaatcttgccagcataaatcttacaacgtgcttatccaaaggcccagtgtcatttaatttaaacgaccttcaattgacagcaagaacgactgttatttttttaaacggggtcctggcggctgggaactttccatgtaaaaaatcatgtaaaggtgtaaaaaacaaccgatcacttggcattggcatacaagggttacatacaacttgtctccgcttaggatttgatttaacttcccaaccagctagacggttaaatgtacaaatagcggagttaatgttgtatgagacaatgaaaacaagcatggaaatgtgtaagattggcggcttagccccgtttaagggttttaccgaaagtaaatatgctaagggatggttacaccaagatgggttttctacgataagttatttagatttaccatggtgtaccctgcgagatgatatttgcgcttatgggttatacaactcgcagttcttagcgttaatgcccacagtttcatctgcacaggtaacggagtgcagtgagggtttctctccaatttataataatatgtttagtaaggtcaccacctcgggtgagttacttagacccaacttagaccttatggacgaactaagagatatgtattcatgtgaagaaaaacgactggaagttataaacatacttgagaaaaaccaatggtcagtaatacgttcgtttggctgtttatctaatagtcacccactcttaaaatataaaacagcgtttgaatatgagcaagaggatctcgttgatatgtgtgcagaaagggcgccatttattgaccaaagtcaatcaatgactttatttattgaggaacgcccagacgggacaattcccgcctccaaaataatgaatttgcttatacgtgcctataaagccggccttaaaacgggtatgtactactgtaaaattcgtaaagctacgaacagcggactgtttgcgggaggcgaattaacctgtaccagttgtgctttataaatttacacgggaaactattccaaaatggatcagaaagattgcagtcattttttttacaggccggagtgtccagatataaacaatttacgtgccctgagcatttcgaatcgttggttagaaagcgattttatcattgaagatgattatcaatacttggactgtttaacggaagatgaactaatattctacagatttatttttacatttttatcggcggcagatgatctggtaaatgttaatttgggctctctaacccaactcttttcccaaaaggatattcaccattactacattgaacaagagtgcatcgaggttgtccacgcgcgtgtctatagtcaaattcaactaatgttgttcagaggggatgaatcgttgcgggtacaatacgtaaatgtcactattaataatccgtcgatccaacaaaaagtacaatggttggaagaaaaggtacgggacaacccatccgttgcagaaaaatatatactaatgattcttatagagggcattttttttgtatcatcgttcgcggctattgcatatttacgcaataacggactatttgttgtaacttgtcaatttaacgaccttataagccgagatgaagccatacataccagcgcatcgtgttgtatatacaataactatgtacccgaaaaacccgctatcaccagaatacatcaactgttttcggaagccgttgaaatcgagtgtgcgtttttaaaatcccatgcacccaaaacccgtttggtgaacgtcgatgcaattacacaatacgtgaaattcagcgcggacaggcttttatcagcgattaatgtaccaaaactatttaacaccccacctcccgattcggactttccacttgcatttatgattgcagataaaaacacaaatttttttgagagacacagtacatcttatgcgggcacagtgataaacgatttataacatgtatatacgagcaaaataaaacaatgaaccattaagtcgctcttatgtgtgttttaattccaatattttgttaatacagtgtttagtgggagtggagtaggaataaactgtttaaaaatacgtgcgtattggcgagccattttttccccctttaagttatgatataaggtgttaataaccatatatgggtctgccgtattttgcataatatttacacgtttcattaactttaggcgaccgcgggtcaatggagttaccacggcgattatatgttcaacaaatgcgcgttccaaattatccaatggggaggatgagggtggcagaaggtttaaagcccaactggcgtctactgtcacctccgatcggttagatgcatatttggaaacggacactccgttttctgttttacccgacgtggctacggtaagacttttgaaaacctcgccatgtctccacgagtcgtaagtgggggagcgcgttgaagtgtccatttgatgtggaactttcaggccggtatcctgaataacttgctgaacagattttaggttgtcacttgtatgcaaatcggtctgacagcgaacaaaggcaaccaaaaattcagggtatgtaattcctaaatattgaagcaaatcgcgacatcgtactactggagcaaacataggaattgcatctaacaaaatatcacagcccatgaagagtaaatcagtatctgtcgtataaaccaaagccactgtacgcgtatgaaataagtttgcacatgcctcgtccgcctcaatgtcaaccgcctcgacgtatgcataccccatccatctaataagacttgcacacaatttgtgatataatcgatggttaggatgtcctcgggatggcattgtagaggtaagactgcatacgttttggtcgcgcaggcagatcgtcttgtcagtttgtcgtggacaaccgtccaaaaacatatcctgggatttgttttcttcgctaggaatacaactcgtggaagagtttcgaaacacactgtcatatgtttccgatgttttgttatacttgatagaacatgatgtgttggatgatagtagaacacgggttaagtccgaggttcccctttcatcgtggttcatggcccgtgacataattgccttggctccacgtgataatgggccgtctgtacaacgttccaatacaaatatcggatagtatgaccgttgtgttaatagccgcaataagactccaagacaatgtatcgttacagatggtccgtgtaaattctcgcgtttacccacagggtataaacgttccaacaatgtgtacatgacgttccatacgtctaccgccacgggggttaaaactccgggtggcgttgaaatgatgctgggtttaaccagtttatgttcatggataaagcgtgtcagtccaaagagccccatcaatacacttaaccaagtttatatcgtcttgtgaaaggtttcacagcggcttcagtaattcttcgatgtgatcttgtgttaattacagacgtatataatgatgtacatattttttatgacaaacattacatcaaatctggtaacttcttacgtattttattgcacagtccctattaaggaacaccccctgtattggaacacgtggaaatgttccctcccatgggccgtactattcaaatatcatgcctgtttatgtacttaagtcaccggatcgggttaaacaaacatattaacgaaactcgtgtgtttacatatgattactttttctatagtaaacattttaagtagtaaattatggatttgaggtcgcgtacagacgatgctttggacatggaattgcatgcgggttttgacgccccagaaatcgccagagctgttttaacggaaaaaacgcttactggtttaatttcgtctatatcacctctggttaatagactaagggattctattttaatattcagcgacgaaggattaattattcactgtagtttggaaacagaacaactgtatattcctataccggcaaatatgtttgaccagtataattggactgggccgagaatggttgtactcgcggcaacggagggacggtcctcgcttattgacgcgtttcgccatacaaaagatccgtcgaccccaacacggttatattttaaatttaccggacaaccccccgagcggagtattatccaaacgatggtatggcaacgcccgggtgattgtggtccagatgatcaagtacaatgttacaaacaagttgtaaaacgtgaactcgcttgttatacaatgatgtttccaaatctaactccagatataagcatttgcttaaaacgcgatcaattcacccgtttacagcgactacttaaaacttttgggtttacaacatgcttcattctaacagccacggatatgtacatccagaccgccgggggtggttttatctcatttaatgtttccttggatataaacggaagcaagcctacaccatataatttaatacgctcaatcacaaattcaaaaaggatccttaataatgttgtttatggcagcgggagtatgcgtgaatttggagtattattggaaacacacagtggattccgttctgccgtacaaaatcttaagttaacacgggatgagacgtgttatattaatttttatctcgccttaactaactcccccatggttggattgtatatccaacgttccgcacccgtgcattcttttttttatgcaacgttcttaagtcccaaagaccttaaagaaaaattaacctcgatgcaattatttgcgaacatggaatctgtgaaggatgaaccaccattaaaaaaaagacgcaatttattaacaaaaagaaacgaaaaaaataccggaaataaaatgggggggaaactccccgaaaccacatggcaggagggaatcggaattcgcgaatattgtgtggctcctccagtggaccctgcaggaaccctggattattctgaattatcacgtgaatctgacgtaatatgtacagttaaataagtgcaacttttgcttatattttacatacaaacttgtgtgtaccatagatgaacacatttttatttgttttgaattattaaacttaagacatggccgtgaatggtgaaagagctgtccatgatgaaaacctgggtgtgttagacagagaattaatccgcgctcaatcaatccaaggatgtgtcggaaaccctcaagaatgtaattcgtgtgcaataacctcagcatcgcggttgtttctcgtgggactacaagcaagcgttatcacgtccgggttaattttacaatatcacgtctgcgaagctgccgtcaatgcaactattatggggttgatcgtcgtttcggggttatggccaacatccgtgaaatttctacgcacattagcaaaattgggacgatgtttgcagacggtggtcgtgttgggttttgctgtgttatgggcggttggttgcccaatatcccgggatcttccatttgtagaattactgggaatttccatatccgcgattaccggaacagtggctgctgtgcatatccattactacaactttgttacgacattcaatggaccgcatatttatttttatgttatgatgttgggaactgggttgggaggtttactaaccgttattttatatatgtatgtcagtaaatatgaggttcttattggattgtgtatatctattgtcacactagtttcaattgtcgatgccgccaccgatttgcaagatacgtgtatatatcgtaaaaatcgccataagcaattaaacacttatacagatttaggttttgccgttgtatatacacaaaatgaccgcgggagagtatgtgaccatcgagaaagttcccggacccttaaacgcgtgtttaaaggaattcgtataatgtctgttatacccccggtgttatatatagttaccccattaatgtgggcaatctcacatataattaaattaaatcattttatcaaacttacacaagtaacgttagcagtttcaataggaggtcatattatagcatttgggttacagggttttgccgttttatatcaagaaaaaaaaaacctatgggtaattgtattatatacaacgacctcggtgacgggtatagctgtaacatttgccggcatttcatggggagctattataattctaacatcaacagttgcggcgggtttgacgtgtattcagatgatgagactaagcgttaaacctattgactgttttatggcatctcatatcactaaagtatatcacgtgtgtgtttatattataataaatctatgctatctatgtggtacatatgtatcgtaatcgagataaataaagtttttaaagttgcaaaagccgtttttattattcccaatgtcgaaaaaaacgtttccatcatttaaattccgcggtgggtgttttaatcttttatttaaggggagcgtggatgtgtcaataaaaaccaggatgaagcggatacaaataaatttaattttaacgatcgcgtgtatacaattatcgactgaatctcaacccacacccgtaagtataactgaattatatacctcggccgctacccgaaagcccgatcccgccgtcgcgcccacctcggccgcttcccgaaagcccgatcccgccgtcgcgcccacctcggccgcttcccgaaagcccgatcccgccgtcgcgcccacctcggccgcttcccgaaagcccgatcccgccgtcgcgcccacctcggccgctacccgaaagcccgatcccgccgtcgcgcccacctcggccgcttcccgaaagcccgatcccgccgtcgcgcccacctcggccgctacccgaaagcccgatcccgccgtcgcgcccacctcggccgcttcccgaaagcccgatcccgcagccaacacccaacattcacaaccaccttttctatatgaaaatatacaatgcgttcacggcggaatacaatccataccctattttcacacatttatcatgccttgttacatgcgtctaacgaccggacaacaggcggcctttaagcagcaacaaaaaacatatgaacaatattctttagatccggaaggttcaaatataacaaggtggaagtcgcttatacgccccgatcttcatattgaagtttggtttacgcgtcaccttatagatccgcaccgtcaactgggcaatgcgttaatacgcatgccagatttaccggttatgttatatagcaacagtgccgatttaaacttaataaacaaccctgagatatttacacacgctaaggaaaattatgtaataccagatgttaaaacaacgtctgatttttctgtaacaattttatctatggatgctaccacggagggaacgtatatttggcgagtcgttaatacaaaaactaagaacgtcatatcggaacacagtattacagttacaacgtattatcgtccaaatattaccgttgtcggcgatccagtcttaaccggacagacatacgcagcctactgtaacgtatcaaagtattatccaccgcactcggtacgtgttcggtggacttcaaggtttggtaacatcggaaaaaattttataaccgatgcaatacaagaatatgccaatggattatttagttatgtttcggcggtacgaattccacagcaaaaacaaatggattacccacccccagccatccaatgtaatgttttatggattcgggatggcgtctctaatatgaaatattctgctgtcgttacccctgacgtctatccatttcccaacgtgtctataggtattattgatggacacatagtatgtacggcaaaatgtgtgccacgtggcgttgtacatttcgtatggtgggttaacgattctcccattaaccacgaaaacagtgagattactggggtgtgtgatcaaaacaaacggtttgtaaacatgcaaagttcttgtccaacatcggaactcgacggacctatcacctattcgtgtcatctagatggttaccctaaaaaattccctccgttttcggccgtttatacctacgatgcatctacctacgccactacattttccgttgtagcagttataattggtgtgatatctatccttgggacattgggtcttatcgcagttatcgcaaccctatgcatccgttgctgttcataaacagaaaccaaccaaacgcgtctgtgtatatcattttattacattcgcaacacatctactgtcttgacaacatttaaaaatccattaaagagccatttccatttttaggggggggtgtggattatatccatcaagctgaaaatcgtcccatttaaagtcgtttatatctgttacatttcgaataattttaaggcaaggaaaaggttttggggatcgagctagctgcacttttaaagcatctatatgattcaagtaaatatgtgcatcccccattgtatgaattaaatctccggttttaagtcctgtaacatgcgctactatgtaggtaagaagtgcatatccagcaatgttgaacggtaccccaaggcccatatcccccgatctctggtatacttggcaggataattcaccgtttgcaacgtaaaactgacataacgtgtgacatggaggtagtaccattaaggggatatcctttggattccaagacgatataatcattcgtcggctttctgggtttgttttaattgtatctataacagtttgcagctgatcgattccttgctgtaaatagtttgattgacagtctttatattccgctccaaaatgtctccactggaagccgtaaatggggccaaggtcccccgtgtgtcttttatggaagccattcctatttagaaatttgctcgatccgtatatatcccatatgtgtatatctttagcggcgagttctttggaatcggttgacccgcggataaaccataacaactcttccacgacggccctccaaaaaacacgctttgtagttaaaagaggaaattcatttcgcaaattgtatcgagcttgcattccaaataaagataacgttccgattcctgttcgatcgcgtttccgaactccataccttaaaatatcatccacttgttttaagtactgaagttcgccggttaacgtaaaacccggcacctttgtccaacatgacaagtctcccatggtaccggtaataatcgttaaatacaaacgaccacttgatattgtgggtacattaagtaaaatttaaaggagtaattccttttataacccaatcaaccaatcagacctttaaataacgcagtccaattattgaacagaaaatacgcaatagactattttctcccaaatcccccaattttaacctggttgtggaaatgaccgccaaagtgcctagtccataactatctattaaccgctgtacttaatgatgactcttaggcgtatttttcctaaacgtaaccgtggttttacatctaacgggaacgtcgttgggtataaaatctggtgataagtcatcgtctgtatgcatgtctccggaggtgtacccgttaaggctatccacatccaggtctgaagatgagttaaaacccacttccttgggtggtatattttcatatacgtgatcatttaaagatgcttgggtttctatgtgacgtaaatccgatctttggtcaaacattgtgtttgattcatcccgaaccggaccttcatattccgcctttatccgggtgtaatgatcaggatacgttgggtcaactggactaccgtccgtatggcctatgtccagacagtggttttttcggacagttacatccaaacccgtgtctggacgaactaaaacgcgagaagtccgctgtctatttgtatcgggtgctatactgtttaacggtgcttctgtattaattacatgcgaacttgcatttacgtcgtcagataaataatttcccgttaaacagacacattccaaattccctatacctgtccctattggagatcccagtcgattaaaacgaatatacggctgatcagacacactcgatggttcggatatacgtcttaaatgtaacggagtataccgtttactggcggcaagaacctgagcataatactttgtgggtttacccccatgtgctaaaatactctgcgccacggcccgggaaaaccacatatgggtgctggtctctaacacaacccaactgtgtgttgacattgttctgaccaactgacccgcaaaatataaaaaccgtccctgggcacgtagcgcctttaatatataaggatcgtttaatcccccatccccccaacatgcatatccaataagcatcatattaattaagtattgaaaatggtggtgcaaaagcgtaataagttcaaccgccgcaacaattgcagctgcggttccatttaaaccatcccgccactcttcctttcgccataatacactaatacgcaaaagcgcagtaagagcgctggcagttgttgctgctaaaataaacgcaactcctgtgcccgctgagaccgcaggacccgtttttaaatgtcgtctaagcaaatcatctggaataacagacgcgcgcggccctcgaatccgtcgaaattgaagtttgagatggcgacataccctggcgtccacaacgtccaagaaccataacatccacccgtagccagtagccgtgtaagccgcaatttcttgtacacgtattcttgtatccgggctggggtttgtaggatcatctggacgcataaaatacatatacttttgcacagctcctaacgcctcacgtagctcctgacatattccccggtaatccgaatttataactttagatttaaaaggatgtctggatattggtttattggcaactacggatgaaaacaacaaaaccgtggatttagactttttatttaccttctctgaagtcaccggtacctcggctcctgtggtgtatttgagatactgccaatatgtattttcataaacccaccaaagtccatccccagaaagtttcaggtcatccaaacatctttgaattgtttccatataacgctgcataaacccgtcatgaacatcgttagacatacacgagaccaccaacgattcaggaacattattatggtgtaatccaagcagaacactgtgtctttcggtactttgtaaaaccggcgatgttaggctgtcggtcttttcagataaagcctttaccgccgtctccaaagcctcgccgggcgttggaataagacatccatccctcacgcgctcgctggttatgcgttgggaaatagaacaccagtcccgggtaggtgtgggcaaatcacgttcgccggcattaaaactttggtaactaccatcataagatttacgcgttctatcatcgctggaaaaggaacgcgcaaaccgagaaaacattgcgatatggacaaattatatcttgtaaaggtcgatcctcacggaccccccacacaacacacacaacaaattttaaggtctaaacagagattttattttacaaactcctttgtgggtgtggctaggaaacgttcttttcatcctaatgaaaaaaatcacaacccttaatattttcgtagtaaatgcatggctacgcttttccaatccaaacccagaatttcattcctgtattgcataagattttcggctaggtccacggagggaatgggctgttctcggggatagatggtctccaatcccacaaaacggaagttcatctctataggtgatgcctgaactatcctgtcttgctctttgggtaaaacgtccgttgtcggtcgaatccccaaagtttgcattgcatcatcgcggtctttccaaaaggatgttaaagtttggtgagcgtaaagaggacttgctgccaacattaaagtattatatgcatctaaaatacctcgggggatgtaaattgaacatcctccgtacaacgcagcaccggagagaagcaacaaaagaagatttgcatgacccaacacccgttgtaacaataaaacggcccccaggtacgcgcttaccattaaatcggtctcactttccttataacaatcggcaaactctatcataaaatttgtggctgctgtgcgaacagcctcatatccggttaattcgtgtgcaatagttgcgtaggattcacaaacagttgggaggtcgacctcgcctaacagtaatacctctaaatcacataacaggtcactattaaccgggatatagtaatagggcagagattcacagaccgcgatgtaagccgaacgggaatggtaaggagcagctaaatacattgcagttgctctacagatccagttcaacattcctccaccaagagtaacatacaacgtaaaaaatgacgctaacatttcccgttccgttggggtaaattgtggctttaaactatgtgtacgtgaaaataaaaaccattcggcaagttccatgtgaccggtagcatatcgcaccaaagatgtagatggttcacttatagcaattcttagttcgggccaatatgccaacgccccaaaaaaaccacgcataatggcaaccgttggaccccgatttggcaaaaccaactgtgtcacttggagtacgtcgggtacggcttctcgtggtaatccggcaagatggtcttctaaccaacatggatcccccacgccaaaattatcgttacgtcccaaaaaaatacagtttgcgctaatacgaattgccgcgtctaacaaaaatcctaatccatctccatgtgaaatgcgattagaaatagcgcatgctgctgtggataatatcatgtgatgccaaatggccgttccttggcccacagcacgtaaggacacgtcataaaacccaggaatgtgttgtacatacattttacccgcattatatggaagtgcgtagacggaattccaacgcgggccgtatttatgtgttttactggaagcccgcctatctaaaaatacatcttcaactaaaatacgttctatagaaattggctgggccataaattcaataggaaaaatcaataaaagttcaccaagtgtcatgttaggaagggctggtatagttctcaaaatctgtgggggtgtcatccgggaagtatcaaactgataccgtaaatgaattgggtcgtataatccttggaccgtaatatattcgcgacgggtacattcgcgcatagcaaaccaggactcatcaaacccattatgcgctaacatagagcctgttagggtaacaggttcaacacaacgttttgatacattaagttcctttgataccgcaggctccataacctttgcaatgcgaagatcggtactgtaacttatttccgggtctaacgtaaaataaacctcatccgcgtctcgactgcaaacttgacttacagaaaaataatcctcctccgcctctccctcgtcgtcgatcgcgtcctcctccgccgcgtcctcctccgcctctccctcgtcgtcgatcgcgtcctcctccgcctctccctcctccgcctctccctcctccgcctctccctcctccgcctctccctcgtcgtcaatcgcgtcctcctccgcctctccctcctccgcctctccctcgtcgtcaatcgcgtcctcctccgcctctccctcctccgcctctccctcgtcgtcgatcgcgtcctcctccgcctctccctcctccgcctctccctcgtcgtcgatcgcgtccgtattgatgttgatttcctcattagcttccctctccgttaatttaaatatgcgattttcatgtctggaagttgatgtattttgttcggatccattatatgtagaatgatgtaaggcgtatcccggaaaatcatccgatgcgtcagaactgctgtcctgatccatctcggagttcagtagttcttgaaccgcaactaatgtttctgaattggacaatatctggggtgggtgtgtataccaattggttgaccgataacgtgttccgtgtgtgtgacggggggagtctgtggtattagacgatatccgctgtcggcgggattgcctccggttataatgacccgactgcatacttataaccgagacaaacaaacgcgcctgtaaaacatcccagggtcgcggtacgcaatacgcatacactcgttggggcttcttttatatatgggactttagagcacatgacagacataccatatacggcgcattgtaaaaataaaaaacgcatgcacgttttcgtaatttatttacaccctctaccccaatgacgtttaacgcgttaaaaacccacacgtgggtgggcgtggtgggtcccccggcaggatctcggatggggacggaggtgctaaaatcatagcttcgatgctactaccgtagtttctattttcaacaacttttgcgtaaggatgatccgctcgtacatgtctcggttcttgaggatgtttgaccgcatatgcgtctaacttacgcttaatgtggtgggtaagaaaacccaccgaccgtggtaaatgaaccgaaaatgagggttgttgaaccaacggagatttgttttcttcaacaagaccacatctaactagaggcagtcccagttctcggcggcggtaatttatttccctcaaggcagacgctgttagtggtttcccttctaataacacaatgccgtggttgcataatacaggatgaaacgcacacgtgaactgtcgacgttcggtccaggtgaattttaaagccgcaaacacgtccgggtgtgcagattgactggcgtacaaacgccaggaaaattcacgcgttacggttaaatataaatgtaggtacagaagacgcgccaaacttgccacctcacgataatatctaagtagaatactttgcctgagttgcgtgtaagctttctggtcagggttttgtatattaagacctattgtcgtccttttcgccgttccttggagataacgtataatcgatttacaataagtaactagtagttttgtgtatgcttcttcccgggcgcgtagttctacggtaaacgaatcctggacctcctgaacgtaagctggaagccccgtcggttgctttggtggactaggcaatcgaacggaaccccgggttgttaaattaaacatttcaacatggtctttggttgaaacggttgagataacgtcatctggatccggggataaaaccatcatatcggaatataggtcctcattaataggaaaacatgagaataaatcctcgttccaggtttcaagacatgatagtaaacgcggcccttctgaaaaatcaagatcccgtattaactgttgatataaaattttagggctagctacccaaggcggagacggagcagttttaactgcatgtgaatataacgacgtttcaaatccaatatccgatgctacatcaccaaacaacgattcatcaaatgcgtccacaaccgcttgttccgttttactacgattccacgtatctgtactaggatgttcggttcctaaattacactccatacttatagagtaaaatctttagtttaaataagcgattccctttatcaaaacccgccgtctaatggggtttgtttggtagcaactgattataaactgttcataataccacgtggtactatttaaacagtttataatatgtgacatataatacacatttataataaacacaaaccacgactgtcttttatacgtttatttattatacataataccgggtaaaccgttactgcgtaattatatccctattttcgcgtatcagttcttgatgcagaacgggccctacttcgattagttatacgcccagtcgtttgtgtatccgttcgactttttggcttacgaacttgtgcgtacataggttcattacccatgcccccctgtaaatctccagtttttcgattatgtccacgtttggataccgatgctccttcacctaggtctgcttcattagcggcttgtattaaatttaaaccctcatgcaccgtaatacgaataacggctccggttaacaaacggtctaattcggcgttattccttgggggattactattccaagccgcttcggcagccttttgtgcctgcatggcggctacgcgccggaccgcttcacaaaagacgcgtttgttatatgatggcgtaggaccgcaccacgagcttgttgcggtttttggtgcagtgctgaaggaaattggtctcccgctggcaattgcgcctgctcccgggggagctcgcttcggtgaatcctctaatttaggtttaaccgccgcatttttagtaaaagatctagatggtttttctacacttagcgggttttcatatacagcatcttcaaccagttcatgtctcaaacgggcctcccgaaaggcggccactacttcatcgatgtcttcaaagtcatcttccgatccgctggagtcgtttggttgatgtacgcgaggggtcgtatttttatgttcaaaataaagatccgcgtacactggagaaggagaatcggccccaactgtggtaatgtaacccaacgagtcgtctgaatcatcggggggtcctacgaccacacttcgccgcgcggttcgatattgtccggaataactaggcgttgttttacgacgcactgcattagagcgacaaagtctgtcaccgtcggaagatgccattacgtaaataaacgatagggtcgtgaaatatccaaacacggcagaccgcgtattaaacaggggccctcttatacacgcctgccccttttataggcaaacgggtttaccacgtgctgcgtaatacagaacgagtaaataaccggaaacacgcatgataagctaacgaaataagggctacacacacccccaaaagggatgcgtagaagaaaagggtggtgatcattgatccgtcgatataaactccacgagccgaacagctggcatgccaaaaattccgttctgcaaagtttggctccccactgctgtcttcacaaaaaaataaaatttgcatcgttattaatatgaacgaagcggtaattgatcccatcttggaaacggcagtaaatacaggtgatatgttttgtagccaaactattccgaatcggtgtttaaaagatacaattttaatagaagttcaacctgaatgtgcagatacgctgcaatgcgtgttagacgataaagtaagtcgacatcaaccgttgttactccggaaccacaagaaactcgaactgccatctgaaaaatctgtaacacggggcggtttttatatgcagcagttggagctgttggttaagtcggcgcctcccaatgaatacgcactgttgttaattcaatgcaaagatactgcccttgctgatgaagacaatttttttgtcgccaacggagttattgatgcgggttacagaggagtaatttcagcccttttgtattaccggccaggagtaaccgttattttacccggacatttaacaatctacttgttcccggtaaaattaagacaaagtcgccttctcccaaaaaacgttcttaaacatctggatccaatttttaaatcgatacaagttcaacccttatcaaactcgccgtcaaattatgaaaaacccgttatacctgaatttgctgatatttccacggtacagcaggggcaacctttacatagggattctgcagaataccatatcgatgttcccttaacctacaaacatatcatcaatccaaaacgccaagaagacgcgggatatgatatttgtgtaccatataacctatatttaaaaaggaatgaatttataaaaattgtcttaccgattataagagactgggacttacaacatccgagtataaacgcttatatttttggaagatcatcgaaaagccgatcaggcattatcgtgtgtccaacggcatggcctgcaggagaacactgtaaattctacgtatataatctcacgggtgatgacatacgtataaaaacgggagatcgtcttgcacaggtcctgttaatagatcacaacacccaaatacacttaaaacacaacgttttaagtaatattgcatttccttatgctatccgcggtaaatgtggcataccgggtgtacaatggtattttactaaaacgttagatctaatagccacacccagcgaacggggaacgcgtggatttggttcaactgataaagaaacaaacgatgtcgattttctactaaaacattaaatgtaataaccacgccagccagcaatgttttaattttatatacaaaataaaaacatacaccagaaacgtttttagtttttatttcaatatttatacaagcataacatgggatttcttgatcgcgggggttgtgcgttgtacatcttgcgtctgttttggggtcaacacgggctgaagagtttctgtcggatacgttttttttgttaggttagatgtgttattatccgatacttctataagtgggggtttaatttcagataattgtgtcgcctccgatttaataggtgatgtttttaaacccacattttcccctttagctatagataattcatggttgtgggaaacatcaaacgatgcctgaggtttagcaacgaccccaagagttttctccaaaagaacaacatcagacatgaccacttcactttcagcggtcattctcagggtttgatcgacaatatcatccgtagtaacatccaccgcgccaaccgataaatacaaatgggtaattgcagctaaacacatatcagcaagccgttttgagttttccatgtgtgaacggaccacggcgttaagaccggggttatcttcagtaaaatggtgctgttttaaacattcaatgttacgagaacatgcagcgtaagttcgcgccaaagcctgggcgcggaccaaacgacgggtattatctgcagaagcgactacgtcttctaacgttagaggtgcaggcaataatccattcacagcggttaaagcctcttggaggcggagcagggcggctccttgggggtgcgtgtttacacgcacctcttcataagatggctcttcagttggtattcgagcatatccacataagctggcacacaccgtctgcatgattgactggctttccaacgtattgaactatggataaatcctccaaaccgacgattcggttattatttgccacaaagggatgtgcaatctcccactcgctgttgttgcttaccgggcagataagcacagaacctctgtatgtggtgagttatacttggactcccgacttagatgacgtctttgtcaaaaatgggagggaagagatcacgcaagtaatcccaactaaacgcccacgtgaagtaactgaaaacgatgaagaaaaccaaataatgcatttattttgtagtagggacgtcaacgttattttttatttaattggtggattttcaactggagatgtacgatcccgggtctggcctatatttttttgttgttttaaaacccaaactgattttaaagctttatataaggcgttatggtatggagcacccctaaatccgcatataatatctgataccctatgtatatcggagacgtttgacattcactcggaagttatacaaactctgatggtaacaacacaccatttaaaccgaaagggattatcggacaacggcctatgcatcacagaggcaacactctgcaagttagttaaaaaatccgttggtcgtcaggagctaacatcattatatgcccattacgaacgtcaagtattggctgcatatcgacgactctactgggggtatggatgctcgccgttttggtatattgttcgatttggaccctctgaaaaaacgctagtgttggctacacgctattacttgttacaaacggacacaagttacaatacgttggaaacccccttatatgacttacaggcaattaaagatttgtttttaacttaccaagtcccggcattacctaattgtagtgggtacaatatttcggacttgttgtcttttgataaactttccatgttttgttgttcctcaacatatacacgaggtttgacagccaaaaatgctctatcgtacattttacagcgaatacatacagacacaacggaaatacacgcagtatcggagtatattaccaacgatagaaaaggccttaaagttccagaccgtgaatttgttgattatatttatctggcacattttgaatgtttcaatcggaaacagatcgcagaccacctacaagcggttacatactcagattttgtgaataaaccggtcctcttaaaatcatccaacctgggaaaaagagctactgctaatttttttaatcatgtacgttctcgtctcaacatgcgtgactatataaaaaagaacgtaatttgtgatgtcactgaacttggacctgagattggacataaatatacaattactaaaacatatactttaagtcttacgtatgccgcaaaacctagcaagtttataggcgtatgtgacctagctacaacgctaactcgtcgtgtggaaaacattgaaaaacaatttagtccatatggatggtcctccactattccctcaaatccacccggttttgacgaattgtctaattttgaggattcgggtgtttccgcggaggcgttacgagcagccaactttgcaaacgatacacctaaccaaagtggtcgtactggttttgatacgagcccggggattacaaaactattactgtttttctctgctgccactgggatagccacacatgatgtatccatcctgagttataaaactccattagaagccctcatcggccattctgaggtaactggaccaatgcctgtatatcgggtagccttgcctcacggcgcccaagcatttgctgttattgctaatgatacgtggtcatcaataacaaaccgttacactttaccgcacgaggctcgattaattgcggaggaccttaaacaaattaatccatgtaattttgttgccgcttcactacgagatatgcagttgactttactattatctacgtctgttaaaaacgtttctaaaatttcatcaaacatacccaaagatcagctttatataaacaggaatgagctatttaatacaaatcttataatcacaaacctcatacttgatgtagactttcatataagaaaacccatcccattgggtattttacatgccggcatgcgagcatttcgtcatggtattttaacggccatgcaattactttttccaaaggccgtggtaaaccctaacaaagacccatgttatttttataaaactgcatgtcctgaacctaccgttgaggtgttggatgatgataatttattggatataaccagccattctgacatcgatttttacatagaaaatggcgaattatacacgtgtgtagaagagaattatacagaggatgtatggttttttgatacacagacaacgtctgaagtccatacacacgccgatgtatcaaacaatgaaaacttgcatgaaactctaccctgtaactgtaaagagaaaataggtttcagggtatgcgtaccaatcccaaatccctatgcgttagtggggtcttccactttaaaggggtttgcacaaatattacagcaagcggtgttgctggaacgggaatttgttgaatatattggtccgtatttacgggacttttcgtttatagatactggtgtttatagccacggacatagtttaagactgccttttttctccaaagtaacaaccacagggacggcggttggacaactactcccattttatgttgtacctgagcagtgtattgatatattagcgtttgtgacatcacatagaaacccggcaaactttcattttcattcaagaccgcagtcgaatgttccagtgcaatttattttacataaccttgggggggaatacgcagagttttttgaacgtaaggttgcgcgtaataaacaaatatttagctccccgcaaatatctttaacaaaggctctaaaagagcgcggggtaacttgtctggacgcatttacactggaggcctttgtcgacagcacaatattagaatctattgtggagcatattgctgttcatttccccgggcgtgatcgcgaatataccttaacatcatcaaagtgtatcgccatcaaaagggactgggtgttatttcagctcatatgcggaacaaaagggttcacttgtcttcgatatccccatcgcggaggaagaacggctccccggacatttgtgtctctgcgagtggatcatcacaaccgtttgtgtatttcgcttgcacaacaatgttttgctacaaagtgcgatagcaatcgcatgcatacaatctttactctagaagtacctaattatccaaatttaacttcgagttaacaccaaccgtgtgatactacatcgtgcttgaattgccatcttccacgggtcatgcaggctttaggaatcaagacagaacattttataattatgtgtctacttagcggacatgctgtttttaccctatggtataccgctcgtgtaaagtttgaacatgagtgtgtgtatgcaaccacggtgattaatggtggaccggttgtatgggggtcttataacaactctcttatatatgtaacgtttgtaaaccactcaacgtttttggatggcctatctggatacgattacagctgccgggaaaatctattatcaggagatactatggtaaaaaccgctatttctacacctttgcatgacaaaattcgaattgttctgggaacacgtaattgtcacgcttatttttggtgcgtgcagctaaaaatgattttttttgcatggtttgtatatggtatgtatttacaatttcgacgaatacgtcgtatgtttgggccattccgatcatcctgtgagttaatatcccccacatcatattcactgaattacgtaacacgggttatttcgaacattcttcttggttacccatatacaaagttggcaaggttgttatgtgatgtttccatgcgacgggatggtatgagtaaagtatttaatgctgaccctataagttttttatatatgcataaaggtgttacgttattgatgcttttggaggttatcgctcatatatcatctggatgtattgtgcttttaacgcttggcgttgcatatacaccatgcgcgttattataccccacatacattcggattctggcctgggttgttgtatgcacgctcgctatagtagagcttatatcttatgttagaccaaaaccaaccaaggataatcatttaaatcatatcaatacggggggaatacgtggtatatgcacaacatgttgcgctacagtaatgtccggccttgctataaaatgtttttatatcgtcatatttgctatagcagtggttatttttatgcattacgaacaaagggtgcaggtaagcttgtttggggaaagtgaaaactcccagaagcattaatcatgtgactaaacacgcccattgcggggttgggtgagcctataaattctacaacattggcggaagatacaggcaactgcaaacacgcaattgtcagatattttgcagccatggcctctgcttcaattccaaccgacccagacgtgtctactatttgtgaagactttatgaatttgctaccagacgaaccttcggatgactttgcattggaagtcaccgattgggcaaatgatgaagctattggctccactccaggcgaggactccacaacgtctagaactgtgtatgtggagcgtactgcagatacagcatataatccacggtattccaaacgaaggcacggaaggcgtgaaagctaccaccacaatcgcccgaaaactttggttgttgtattacccgattcaaaccatcatggaggaagagacgtggagactggatatgcacgcatcgaacggggacatcgacgatcatccagatcttataacactcaaagttcaagaaaacaccgtgatcgatccctgtcaaatcgaagacggcgtcctacaacgcctcctgcaatgaccacgggagaaagaaatgatcagacacatgacgaatcgtacaggttgcgattttccaagagagacgcccgccgagagcgtattcgaaaagagtatgatatcccggtcgatcgaattacgggccgtgctattgaagtcgtctccaccgcgggagccagcgtgaccattgactcggtacgccatttagatgaaacaattgaaaaactggtagtccgatatgccacaatacaagagggtgattcatgggcttccggtggatgttttccggggataaaacaaaacacatcttggccggagttgatgttgtacggacatgaactttatcgtacctttgagtcatataaaatggactcacgtattgcccgcgcgttgcgtgagagagtcatacgtggagaatctttgattgaagcgttggagtctgcggatgaactgttaacgtggattaaaatgttagcggcaaaaaacttgcccatctacacaaataatcccattgttgcaacctcgaagtcacttttggagaatttaaagttaaagctggggccttttgtaagatgtcttcttctaaacagggacaacgatttggggtctcgtactctccccgaactgttgcgccagcaacgttttagtgatatcacgtgtattactacttatatgtttgttatgattgcccgcattgctaatatagttgtccgtggctctaaatttgtggaatatgatgatatcagttgtaacgttcaagtgttacaagaatatacacccgggtcatgtctggccggtgttttagaggccctaatcacccaccaacgcgagtgtggtcgtgttgaatgtaccctctcaacttgggccgggcatctttctgacgcccgtccatacggtaaatattttaagtgtagtacctttaactgctaaaataaaaaatacctttttcatgcttgtcaaaacatactaatttgtatttttaatcattaagcatatttacctgttagaatagtaaatacctatttcatgcttgtaaaacatatcaatttatatttttaatcattatacaccaccccttgattttatcaattgtttatgtgattctatattaataaaagactaataaaaatgtaatattgtgggagtttttaaggcgacgttggggatatatgggcgggattacattgctttcaaaccaatatctttgcaattccgtctctgattcgggtaaaacacacaccagacgtgtaccgaacgtttaattaatggatacaacgggagcttccgaaagcagtcaacccatccgagtgaatcttaaacctgacccgttggcgtcgtttacacaagttataccgccactggcgttggaaacaacgtggacatgccctgccaactcacatgcaccgacgccatcccctctgtacggtgttaagaggttatgtgctcttcgagcaacatgcggccgggctgatgatttacacgcttttttgattggacttggacgtcgagataaaccatctgaatccccaatgtatgttgacctacagccgttttgcagcctcctaaattcccaacgactgttaccggaaatggctaattataacaccctatgcgatgcacccttcagcgccgcaactcagcagatgatgctggagtccggacagctgggtgtacatctggcggctattgggtatcactgtcattgtaaatcccccttctcggcggagtgttggaccggtgcatccgaggcatacgatcatgttgtatgtgggggaaaagcccgagcggctgtcggcggactatgaactacacatttaaataaaaatacgtacaatcgaaaaaaggtgtattttatttagtgattacatcaatacgccctccgtaggttcggcaaatctaacccggtgacagaccggctgttgacggggggatcctttcaatattccacgaatgttggaaactgttggtcttccttgggctgttagggttgggagagtgggtcggtctgacgtggtaagtgcggcttcaccagagtcttctgtcaagttgcatgttaacgtcgacgttatacaaggtgtttcagtggtattttgcgcgatattctcccaaaacataagacgttgcatatgcatatcataaatattaccccgccataaacagagatctctgttacttaaaccgtgtgtgcggagaaatgtacccatagatggagccagtaaatgcaagcccgtaccacattcatacccaagcgttgtggatcgcttttccttcatcgccaaaataataaatgtccttgcacctccaggcgtcattgcacgccctattagacgggcaaggctaagacgttcgccgggtttgctatatttgccaataattacataggttttggtacaggtaatgtgtaacgttcctccgcctggcaggtctacagttctccccgcaagcactcgtaataaacatcgcgtttctgacgcgggattttcctcggcggtggcgtttaaactgggacgcaccagagtggagcccataataaatgcgggaacatgcccatatgcaagtgtctcagaaattacatgcattttatgattttacgggggtgggttacgataatagctattaaacaaacacccaataaagcattttttgtagaacctttattgggtaacacagtcttttcacgtgacaggcaatgtataaataacgtacggatgcacttaagatgtatcgcacataaatttatataagctgtagcaaagtataagcaaatcctgttaatattatatttttgggatccgcaatgtccagggtatcggagtatggggtaccggaaggtgttcgggaatctgatagcgatacagactctgtgtttatgtatcagcatacagagcttatgcagaacaacgcgtcgccactcgtcgttcaaacaagaccaccggcggttcttattccactggttgatgtcccaaggccacgatcccggagaaaggcgtccgcgcaactgaaaatgcaaatggacaggttatgcaacgtactgggtgtagtactccagatggcgacgttggctttggtgacatatatagcttttgttgtgcatacacgcgcgacaagctgcaagcgagaataaataccttccccttccggacagtagtttcatgtagttgagttgggaggttcctcgggaaaaacggcaacaatggcgaccacgacagcagtaagggtgagaataccaaaaagaattaaaaaagccggtacacagcatttgcgaattcttagaaaagccagctgaagtctgtggattccatcataagcgcagtctaggcaatcgtaagactgttgggtggtgccattctccacgtgaggaaaaagaggcggggagaacaccagactctcgcggcttctgtaaggggggggcgcgtctgccacggcctcggcgtatgtgggtaggtaggggatgggggtcgcaacgtcatccatgctgggggacgacgtgagggtgaccggcggggtcccaggtcggcgggagtagtgcacggtcgccatccgagcagtaaacgaggggtggacgcaaaaggcgcgggttttgttaaaggctggcgggggggggtttcccggcaaaaaatcccatcccccccgatggtcgccccgcaaacgcgcggggaggtggggtcgcttttttttttctctctcgagggggccgcgagagggctggcct

SEQ ID NO: 52 - protein, 278 aa, Varicella zoster; identical to SEQ ID NO: 37

SEQ ID NO: 53 - protein, 180 aa, Varicella zoster; identical to SEQ ID NO: 38

SEQ ID NO: 54 - protein, 102 aa, Varicella zoster
MAGQNTMEGEAVALLMEAVVTPRAQPNNTTITAIQPSRSAEKCYYSDSENETADEFLRRIGKYQHKIYHRKKFCYITLIIVFVFAMTGAAFALGYITSQFVG

SEQ ID NO: 55 - protein, 1310 aa, Varicella zoster; identical to SEQ ID NO: 42

SEQ ID NO: 56 - protein, 467 aa, Varicella zoster
MDTILAGGSGTSDASDNTCTICMSTVSDLGKTMPCLHDFCFVCIRAWTSTSVQCPLCRCPVQSILHKIVSDTSYKEYEVHPSDDDGFSEPSFEDSIDILPGDVIDLLPPSPGPSRESIQQPTSRSSREPIQSPNPGPLQSSAREPTAESPSDSQQDSIQPPTRDSSPGVTKTCSTASFLRKVFFKDQPAVRSATPVVYGSIESAQQPRTGGQDYRDRPVSVGINQDPRTMDRLPFRATDRGTEGNARFPCYMQPLLGWLDDQLAELYQPEIVEPTKMLILNYIGIYGRDEAGLKTSLRCLLHDSTGPFVTNMLFLLDRCTDPTRLTMQTWTWKDTAIQLITGPIVRPETTSTGETSRGDERDTRLVNTPQKVRLFSVLPGIKPGSARGAKRRLFHTGRDVKRCLTIDLTSESDSACKGSKTRKVASPQGESNTPSTSGSTSGSLKHLTKKSSAGKAGKGIPNKMKKS

SEQ ID NO: 57 - protein, 305 aa, Varicella zoster
MDVSGEPTVCSNAYANEMKLSDSKDIYVLAHPVTKKTRKRPRGLPLGVKLDPPTFKLNNMSHHYDTETFTPVSSQLDSVEVFSKFNISPEWYDLLSDELKEPYAKGIFLEYNRLLNSGEEILPSTGDIFAWTRFCGPQSIRVVIIGQDPYPTAGHAHGLAFSVKRGITPPSSLKNIFAALMESYPNMTPPTHGCLESWARQGVLLLNTTLTVRRGTPGSHVYLGWGRLVQRVLQRLCENRTGLVFMLWGAHAQKTTQPNSRCHLVLTHAHPSPLSRVPFRNCRHFVQANEYFTRKGEPEIDWSVI

SEQ ID NO: 58 - protein, 71 aa, Varicella zoster
MDVRERNVFGNASVATPGEHQKFVRELILSGHNNVVLQTYTGKWSDCRKHGKSVMYNTGEARHPTCKAHQR

SEQ ID NO: 59 - protein, 331 aa, Varicella zoster
MQRIRPYWIKFEQTGGAGMADGMSGINIPSILGCSVTIDNLLTRAEEGLDVSDVIEDLRIQAIPRFVCEAREVTGLKPRFLANSVVSLRVKPEHQETVLVVLNGDSSEVSCDRYYMECVTQPAFRGFIFSVLTAVEDRVYTVGVPPRLLIYRMTLFRPDNVLDFTLCVILMYLEGIGPSGASPSLFVQLSVYLRRVECQIGPLEKMRRFLYEGVLWLLNTLMYVVDNNPFTKTRVLPHYMFVKLLNPQPGTAPNIIKAIYSCGVGQRFDLPHGTPPCPDGVVQVPPGLLNGPLRDSEYQKSVYFWWLNRTMVTPKNVQLFETYKNSPRVVK

SEQ ID NO: 60 - protein, 541 aa, Varicella zoster
MEFPYHSTVSYNGVTFYFNERATRAYFICGGCLISIPRKHGGEIAKFGHVVRGVGPGDRSVASYVRSELNRTGKTWAVSSNNNCVFLDRVALLAAGSGAVDRDLCGTFDVEVEDPTLADYLVSLPVTHLTLVAGVDVTRENKLKLFPTPTAINTTNGFMYVPNEASFSLVYMRMLELPESLQELVSGLFDGTPEIRDALNGSNDDEKTSIIVSRRAADVVTEDVKADDVPISGEPYSEKQPRRRKKSDHITLSNFVQIRTIPRVMDIWDPRHKATTHCIRALSCAVFFADEVIFKARKWPGLEDELNEARETIYTAVVAVYGERGELPFFGHAYGRDLTSCQRFVIVQYILSRWEAFNCYAVIEDLTRSYVNALPSDDDTDQVAQDLIRTIVDTANSLLREVGFIGTLAETLLFLPLPQLPCYKETSHLAKKEGVRILRLAKTGVGLSDTVPVDVSVTERHEYEISRYLDTLYSGDPCYNGAVRLCRLLGSSIPIALYYNTISGNAFEPYFAGRRYIAYLGALFFGRVHQTPFGDGKKTQR

SEQ ID NO: 61 - protein, 258 aa, Varicella zoster
MSASRIRAKCFRLGQRCHTRFYDVLKKDIDNVRRGFADAFNPRLAKLLSPLSHVDVQRAVRISMSFEVNLGRRRPDCVCIIQTESSGAGKTVCFIVELKSCRFSANIHTPTKYHQFCEGMRQLRDTMALIKETTPTGSDEIMVTPLLVFVSQRGLNLLQVTRLPPKVIHGNLVMLASHLENVAEYTPPIRSVRERRRLCKKKIHVCSLAKKRAKSCHRSALTKFEENAACGVDLPLRRPSLGACGGILQSITGMFSHG

SEQ ID NO: 62 - protein, 579 aa, Varicella zoster
MTARYGFGSISFPNKCGIFLSTTKNFIAPNFPIHYWTAPAFELRGRMNPDLEKNTLTLKNAAAVAALDNLRGETITLPTEIDRRLKPLEEQLTRMAKVLDSLETAAAEAEEADAQSEECTRTEIIRNESIHPEVQIAKNDAPLQYDTNFQVDFITLVYLGRARGNNSPGIVFGPWYRTLQERLVLDRPVAARGVDCKDGRISRTFMNTTVTCLQSAGRMYVGDRAYSAFECAVLCLYLMYRTSNSVHEPQVSSFGNLIEHLPEYTETFVNYMTTHENKNSYQFCYDRLPRDQFHARGGRYDQGALTSHSVMDALIRLQVLPPAPGQFNPGVNDIIDRNHTAYVDKIQQAAAAYLERAQNVFLMEDQTLLRLTIDTITALLLLRRLLWNGNVYGDKLKNNFQLGLIVSEATGTPTNNVILRGATGFDGKFKSGNNNFQFLCERYIAPLYTLNRTTELTEMFPGLVALCLDAHTQLSRGSLGRTVIDISSGQYQDRLISLIALELEHRRQNVTSLPIAAVVSIHDSVMLQYERGLGMLMHQPRVRAALEESRRLAQFNVNSDYDLLYFVCLGVIPQFASTP

SEQ ID NO: 63 - protein, 605 aa, Varicella zoster
MAAEADEENCEALYVAGYLALYSKDEGELNITPEIVRSALPPTSKIPINIDHRKDCVVGEVIAIIEDIRGPFFLGIVRCPQLHAVLFEAAHSNFFGNRDSVLSPLERALYLVTNYLPSVSLSSKRLSPNEIPDGNFFTHVALCVVGRRVGTVVNYDCTPESSIEPFRVLSMESKARLLSLVKDYAGLNKVWKVSEDKLAKVLLSTAVNNMLLRDRWDVVAKRRREAGIMGHVYLQASTGYGLARITNVNGVESKLPNAGVINATFHPGGPIYDLALGVGESNEDCEKTVPHLKVTQLCRNDSDMASVAGNASNISPQPPSGVPTGGEFVLIPTAYYSQLLTGQTKNPQVSIGAPNNGQYIVGPYGSPHPPAFPPNTGGYGCPPGHFGGPYGFPGYPPPNRLEMQMSAFMNALAAERGIDLQTPCVNFPDKTDVRRPGKRDFKSMDQRELDSFYSGESQMDGEFPSNIYFPGEPTYITHRRRRVSPSYWQRRHRVSNGQHEELAGVVAKLQQEVTELKSQNGTQMPLSHHTNIPEGTRDPRISILLKQLQSVSGLCSSQNTTSTPHTDTVGQDVNAVEASSKAPLIQGSTADDADMFANQMMVGRC

SEQ ID NO: 64 - protein, 1194 aa, Varicella zoster
MAIRTGFCNPFLTQASGIKYNPRTGRGSNREFLHSYKTTMSSFQFLAPKCLDEDVPMEERKGVHVGTLSRPPKVYCNGKEVPILDFRCSSPWPRRVNIWGEIDFRGDKFDPRFNTFHVYDIVETTEAASNGDVSRFATATRPLGTVITLLGMSRCGKRVAVHVYGICQYFYINKAEVDTACGIRSGSELSVLLAECLRSSMITQNDATLNGDKNAFHGTSFKSASPESFRVEVIERTDVYYYDTQPCAFYRVYSPSSKFTNYLCDNFHPELKKYEGRVDATTRFLMDNPGFVSFGWYQLKPGVDGERVRVRPASRQLTLSDVEIDCMSDNLQAIPNDDSWPDYKLLCFDIECKSGGSNELAFPDATHLEDLVIQISCLLYSIPRQSLEHILLFSLGSCDLPQRYVQEMKDAGLPEPTVLEFDSEFELLIAFMTLVKQYAPEFATGYNIVNFDWAFIMEKLNSIYSLKLDGYGSINRGGLFKIWDVGKSGFQRRSKVKINGLISLDMYAIATEKLKLSSYKLDSVAREALNESKRDLPYKDIPGYYASGPNTRGIIGEYCIQDSALVGKLFFKYLPHLELSAVARLARITLTKAIYDGQQVRIYTCLLGLASSRGFILPDGGYPATFEYKDVIPDVGDVEEEMDEDESVSPTGTSSGRNVGYKGARVFDPDTGFYIDPVVVLDFASLYPSIIQAHNLCFTTLTLNFETVKRLNPSDYATFTVGGKRLFFVRSNVRESLLGVLLKDWLAMRKAIRARIPGSSSDEAVLLDKQQAAIKVVCNSVYGFTGVAQGFLPCLYVAATVTTIGRQMLLSTRDYIHNNWAAFERFITAFPDIESSVLSQKAYEVKVIYGDTDSVFIRFKGVSVEGIAKIGEKMAHIISTALFCPPIKLECEKTFIKLLLITKKKYIGVIYGGKVLMKGVDLVRKNNCQFINDYARKLVELLLYDDTVSRAAAEASCVSIAEWNRRAMPSGMAGFGRIIADAHRQITSPKLDINKFVMTAELSRPPSAYINRRLAHLTVYYKLVMRQGQIPNVRERIPYVIVAPTDEVEADAKSVALLRGDPLQNTAGKRCGEAKRKLIISDLAEDPIHVTSHGLSLNIDYYFSHLIGTASVTFKALFGNDTKLTERLLKRFIPETRVVNVKMLNRLQAAGFVCIHAPCWDNKMNTEAEITEEEQSHQIMRRVFCIPKAILHQS

SEQ ID NO: 65 - protein, 156 aa, Varicella zoster
MYESENASEHHPELEDVFSENTGDSNPSMGSSDSTRSISGMRARDLITDTDVNLLNIDALESKYFPADSTFTLSVWFENLIPPEIEAILPTTDAQLNYISFTSRLASVLKHKESNDSEKSAYVVPCEHSASVTRRRERFAGVMAKFLDLHEILKDA

SEQ ID NO: 66 - protein, 269 aa, Varicella zoster
MSRRTYVRSERRRGCGDNLLQRIRLVVPSALQCCDGDLPIFDPQRPPARCVFQFNGEDNVSEAFPVEYIMRLMANWAQVDCDPYIKIQNTGVSVLFQGFFFRPTNAPVAEVSIDSNNVILSSTLSTGINLSALESIKRGGGIDRRPLQALMWVNCFVRMPYVQLSFRFMGPEDPSRTIKLMARATDAYMYKETGNNLDEYIRWRPSFRSPPENGSPNTSVQMQSDIKPALPDTQTTRVWKLALPVANVTYALFIVIVLVVVLGAVLFWK

SEQ ID NO: 67 - protein, 235 aa, Varicella zoster
MTQPASSRVVFDPSNPTTFSVEAIAAYTPVALIRLLNASGPLQPGHRVDIADARSIYTVGAAASAARARANHNANTIRRTAMFAETDPMTWLRPTVGLKRTFNPRIIRPQPPNPSMSLGISGPTILPQKTQSADQSALQQPAALAFSGSSPQHPPPQTTSASVGQQQHVVSGSSGQQPQQGAQSSTVQPTTGSPPAAQGVPQSTPPPTQNTPQGGKGQTLSHTGQSGNASRSRRV

SEQ ID NO: 68 - protein, 483 aa, Varicella zoster
MGSQPTNSHFTLNEQTLCGTNISLLGNNRFIQIGNGLHMTYAPGFFGNWSRDLTIGPRFGGLNKQPIHVPPKRTETASIQVTPRSIVINRMNNIQINPTSIGNPQVTIRLPLNNFKSTTQLIQQVSLTDFFRPDIEHAGSIVLILRHPSDMIGEANTLTQAGRDPDVLLEGLRNLFNACTAPWTVGEGGGLRAYVTSLSFIAACRAEEYTDKQAADANRTAIVSAYGCSRMETRLIRFSECLRAMVQCHVFPHRFISFFGSLLEYTIQDNLCNITAVAKGPQEAARTDKTSTRRVTANIPACVFWDVDKDLHLSADGLKHVFLVFVYTQRRQREGVRLHLALSQLNEQCFGRGIGFLLGRIRAENAAWGTEGVANTHQPYNTRALPLVQLSNDPTSPRCSIGEITGVNWNLARQRLYQWTGDFRGLPTQLSCMYAAYTLIGTIPSESVRYTRRMERFGGYNVPTIWLEGVVWGGTNTWNECYY

SEQ ID NO: 69 - protein, 775 aa, Varicella zoster
MEFKRIFNTVHDIINRLCQHGYKEYIIPPESTTPVELMEYISTIVSKLKAVTRQDERVYRCCGELIHCRINLRSVSMETWLTSPILCLTPRVRQAIEGRRDEIRRAILEPFLKDQYPALATLGLQSALKYEDFYLTKLEEGKLESLCQFFLRLAATVTTEIVNLPKIATLIPGINDGYTWTDVCRVFFTALACQKIVPATPVMMFLGRETGATASCYLMDPESITVGRAVRAITGDVGTVLQSRGGVGISLQSLNLIPTENQTKGLLAVLKLLDCMVMAINSDCERPTGVCVYIEPWHVDLQTVLATRGMLVRDEIFRCDNIFCCLWTPDLFFERYLSYLKGASNVQWTLFDNRADILRTLHGEAFTSTYLRLEREGLGVSSVPIQDIAFTIIRSAAVTGSPFLMFKDACNRNYHMNTQGNAITGSNLCTEIVQKADAHQHGVCNLASINLTTCLSKGPVSFNLNDLQLTARTTVIFLNGVLAAGNFPCKKSCKGVKNNRSLGIGIQGLHTTCLRLGFDLTSQPARRLNVQIAELMLYETMKTSMEMCKIGGLAPFKGFTESKYAKGWLHQDGFSTISYLDLPWCTLRDDICAYGLYNSQFLALMPTVSSAQVTECSEGFSPIYNNMFSKVTTSGELLRPNLDLMDELRDMYSCEEKRLEVINILEKNQWSVIRSFGCLSNSHPLLKYKTAFEYEQEDLVDMCAERAPFIDQSQSMTLFIEERPDGTIPASKIMNLLIRAYKAGLKTGMYYCKIRKATNSGLFAGGELTCTSCAL

SEQ ID NO: 70 - protein, 306 aa, Varicella zoster
MDQKDCSHFFYRPECPDINNLRALSISNRWLESDFIIEDDYQYLDCLTEDELIFYRFIFTFLSAADDLVNVNLGSLTQLFSQKDIHHYYIEQECIEVVHARVYSQIQLMLFRGDESLRVQYVNVTINNPSIQQKVQWLEEKVRDNPSVAEKYILMILIEGIFFVSSFAAIAYLRNNGLFVVTCQFNDLISRDEAIHTSASCCIYNNYVPEKPAITRIHQLFSEAVEIECAFLKSHAPKTRLVNVDAITQYVKFSADRLLSAINVPKLFNTPPPDSDFPLAFMIADKNTNFFERHSTSYAGTVINDL

SEQ ID NO: 71 - protein, 408 aa, Varicella zoster
MDLRSRTDDALDMELHAGFDAPEIARAVLTEKTLTGLISSISPLVNRLRDSILIFSDEGLIIHCSLETEQLYIPIPANMFDQYNWTGPRMVVLAATEGRSSLIDAFRHTKDPSTPTRLYFKFTGQPPERSIIQTMVWQRPGDCGPDDQVQCYKQVVKRELACYTMMFPNLTPDISICLKRDQFTRLQRLLKTFGFTTCFILTATDMYIQTAGGGFISFNVSLDINGSKPTPYNLIRSITNSKRILNNVVYGSGSMREFGVLLETHSGFRSAVQNLKLTRDETCYINFYLALTNSPMVGLYIQRSAPVHSFFYATFLSPKDLKEKLTSMQLFANMESVKDEPPLKKRRNLLTKRNEKNTGNKMGGKLPETTWQEGIGIREYCVAPPVDPAGTLDYSELSRESDVICTVK

SEQ ID NO: 72 - protein, 406 aa, Varicella zoster
MAVNGERAVHDENLGVLDRELIRAQSIQGCVGNPQECNSCAITSASRLFLVGLQASVITSGLILQYHVCEAAVNATIMGLIVVSGLWPTSVKFLRTLAKLGRCLQTVVVLGFAVLWAVGCPISRDLPFVELLGISISAITGTVAAVHIHYYNFVTTFNGPHIYFYVMMLGTGLGGLLTVILYMYVSKYEVLIGLCISIVTLVSIVDAATDLQDTCIYRKNRHKQLNTYTDLGFAVVYTQNDRGRVCDHRESSRTLKRVFKGIRIMSVIPPVLYIVTPLMWAISHIIKLNHFIKLTQVTLAVSIGGHIIAFGLQGFAVLYQEKKNLWVIVLYTTTSVTGIAVTFAGISWGAIIILTSTVAAGLTCIQMMRLSVKPIDCFMASHITKVYHVCVYIIINLCYLCGTYVS

SEQ ID NO: 73 - protein, 560 aa, Varicella zoster
MKRIQINLILTIACIQLSTESQPTPVSITELYTSAATRKPDPAVAPTSAASRKPDPAVAPTSAASRKPDPAVAPTSAASRKPDPAVAPTSAATRKPDPAVAPTSAASRKPDPAVAPTSAATRKPDPAVAPTSAASRKPDPAANTQHSQPPFLYENIQCVHGGIQSIPYFHTFIMPCYMRLTTGQQAAFKQQQKTYEQYSLDPEGSNITRWKSLIRPDLHIEVWFTRHLIDPHRQLGNALIRMPDLPVMLYSNSADLNLINNPEIFTHAKENYVIPDVKTTSDFSVTILSMDATTEGTYIWRVVNTKTKNVISEHSITVTTYYRPNITVVGDPVLTGQTYAAYCNVSKYYPPHSVRVRWTSRFGNIGKNFITDAIQEYANGLFSYVSAVRIPQQKQMDYPPPAIQCNVLWIRDGVSNMKYSAVVTPDVYPFPNVSIGIIDGHIVCTAKCVPRGVVHFVWWVNDSPINHENSEITGVCDQNKRFVNMQSSCPTSELDGPITYSCHLDGYPKKFPPFSAVYTYDASTYATTFSVVAVIIGVISILGTLGLIAVIATLCIRCCS

SEQ ID NO: 74 - protein, 396 aa, Varicella zoster
MNEAVIDPILETAVNTGDMFCSQTIPNRCLKDTILIEVQPECADTLQCVLDDKVSRHQPLLLRNHKKLELPSEKSVTRGGFYMQQLELLVKSAPPNEYALLLIQCKDTALADEDNFFVANGVIDAGYRGVISALLYYRPGVTVILPGHLTIYLFPVKLRQSRLLPKNVLKHLDPIFKSIQVQPLSNSPSNYEKPVIPEFADISTVQQGQPLHRDSAEYHIDVPLTYKHIINPKRQEDAGYDICVPYNLYLKRNEFIKIVLPIIRDWDLQHPSINAYIFGRSSKSRSGIIVCPTAWPAGEHCKFYVYNLTGDDIRIKTGDRLAQVLLIDHNTQIHLKHNVLSNIAFPYAIRGKCGIPGVQWYFTKTLDLIATPSERGTRGFGSTDKETNDVDFLLKH

SEQ ID NO: 75 - protein, 1083 aa, Varicella zoster
MDKSSKPTIRLLFATKGCAISHSLLLLTGQISTEPLYVVSYTWTPDLDDVFVKNGREEITQVIPTKRPREVTENDEENQIMHLFCSRDVNVIFYLIGGFSTGDVRSRVWPIFFCCFKTQTDFKALYKALWYGAPLNPHIISDTLCISETFDIHSEVIQTLMVTTHHLNRKGLSDNGLCITEATLCKLVKKSVGRQELTSLYAHYERQVLAAYRRLYWGYGCSPFWYIVRFGPSEKTLVLATRYYLLQTDTSYNTLETPLYDLQAIKDLFLTYQVPALPNCSGYNISDLLSFDKLSMFCCSSTYTRGLTAKNALSYILQRIHTDTTEIHAVSEYITNDRKGLKVPDREFVDYIYLAHFECFNRKQIADHLQAVTYSDFVNKPVLLKSSNLGKRATANFFNHVRSRLNMRDYIKKNVICDVTELGPEIGHKYTITKTYTLSLTYAAKPSKFIGVCDLATTLTRRVENIEKQFSPYGWSSTIPSNPPGFDELSNFEDSGVSAEALRAANFANDTPNQSGRTGFDTSPGITKLLLFFSAATGIATHDVSILSYKTPLEALIGHSEVTGPMPVYRVALPHGAQAFAVIANDTWSSITNRYTLPHEARLIAEDLKQINPCNFVAASLRDMQLTLLLSTSVKNVSKISSNIPKDQLYINRNELFNTNLIITNLILDVDFHIRKPIPLGILHAGMRAFRHGILTAMQLLFPKAVVNPNKDPCYFYKTACPEPTVEVLDDDNLLDITSHSDIDFYIENGELYTCVEENYTEDVWFFDTQTTSEVHTHADVSNNENLHETLPCNCKEKIGFRVCVPIPNPYALVGSSTLKGFAQILQQAVLLEREFVEYIGPYLRDFSFIDTGVYSHGHSLRLPFFSKVTTTGTAVGQLLPFYVVPEQCIDILAFVTSHRNPANFHFHSRPQSNVPVQFILHNLGGEYAEFFERKVARNKQIFSSPQISLTKALKERGVTCLDAFTLEAFVDSTILESIVEHIAVHFPGRDREYTLTSSKCIAIKRDWVLFQLICGTKGFTCLRYPHRGGRTAPRTFVSLRVDHHNRLCISLAQQCFATKCDSNRMHTIFTLEVPNYPNLTSS

SEQ ID NO: 76 - protein, 340 aa, Varicella zoster
MQALGIKTEHFIIMCLLSGHAVFTLWYTARVKFEHECVYATTVINGGPVVWGSYNNSLIYVTFVNHSTFLDGLSGYDYSCRENLLSGDTMVKTAISTPLHDKIRIVLGTRNCHAYFWCVQLKMIFFAWFVYGMYLQFRRIRRMFGPFRSSCELISPTSYSLNYVTRVISNILLGYPYTKLARLLCDVSMRRDGMSKVFNADPISFLYMHKGVTLLMLLEVIAHISSGCIVLLTLGVAYTPCALLYPTYIRILAWVVVCTLAIVELISYVRPKPTKDNHLNHINTGGIRGICTTCCATVMSGLAIKCFYIVIFAIAVVIFMHYEQRVQVSLFGESENSQKH

SEQ ID NO: 77 - protein, 452 aa, Varicella zoster
MASASIPTDPDVSTICEDFMNLLPDEPSDDFALEVTDWANDEAIGSTPGEDSTTSRTVYVERTADTAYNPRYSKRRHGRRESYHHNRPKTLVVVLPDSNHHGGRDVETGYARIERGHRRSSRSYNTQSSRKHRDRSLSNRRRRPTTPPAMTTGERNDQTHDESYRLRFSKRDARRERIRKEYDIPVDRITGRAIEVVSTAGASVTIDSVRHLDETIEKLVVRYATIQEGDSWASGGCFPGIKQNTSWPELMLYGHELYRTFESYKMDSRIARALRERVIRGESLIEALESADELLTWIKMLAAKNLPIYTNNPIVATSKSLLENLKLKLGPFVRCLLLNRDNDLGSRTLPELLRQQRFSDITCITTYMFVMIARIANIVVRGSKFVEYDDISCNVQVLQEYTPGSCLAGVLEALITHQRECGRVECTLSTWAGHLSDARPYGKYFKCSTFNC

SEQ ID NO: 78 - protein, 179 aa, Varicella zoster
MDTTGASESSQPIRVNLKPDPLASFTQVIPPLALETTWTCPANSHAPTPSPLYGVKRLCALRATCGRADDLHAFLIGLGRRDKPSESPMYVDLQPFCSLLNSQRLLPEMANYNTLCDAPFSAATQQMMLESGQLGVHLAAIGYHCHCKSPFSAECWTGASEAYDHVVCGGKARAAVGGL

SEQ ID NO: 79 - protein, 108 aa, Varicella zoster
MSRVSEYGVPEGVRESDSDTDSVFMYQHTELMQNNASPLVVQTRPPAVLIPLVDVPRPRSRRKASAQLKMQMDRLCNVLGVVLQMATLALVTYIAFVVHTRATSCKRE

SEQ ID NO: 80 - DNA, 5743 bp, Varicella zoster
  CDS (1)..(1056)
  CDS (4556)..(5740)
atgtcattgataatgtttggtcgtacgcttggtgaagaatctgtaagatattttgaacgtctaaagcgtcgtagggatgaacgctttgggacgttggagtcccctaccccgtgttccacgcggcaagggtctctgggaaacgcaacccaaatcccgtttctgaattttgctatagatgtaacccgacgtcatcaggccgttattcccggaattggaacgcttcacaactgttgtgaatatattccactgttctcggctactgctcgacgggcaatgtttggcgcgtttctatcgtcaacagggtacaactgtacccccaatgtagttttgaaaccatggcgatattcggtaaatgcaaacgtaagccctgaattaaaaaaggctgtcagtagtgtacagttttatgaatattcaccggaagaagcagcacctcatcgaaatgcgtatagcggtgttatgaacacatttcgcgcgttttctctgtcggatagtttctgtcagttgtctacctttacacaacggttttcgtaccttgtggaaacatcttttgagagtattgaagagtgtggaagtcatggcaaacgcgcaaaggttgacgttccaatctatggcagatataaggggacgttggaactgtttcaaaaaatgatcctcatgcacaccacgcattttatttcatcggtgctattgggcgatcatgccgacagagttgactgctttctgcgtacagtgtttaacacgccaagtgtttctgacagtgttttagaacacttcaaacaaaaatcaactgtgtttttggtaccacgtagacatgggaaaacatggtttcttgtaccattaatagctttagtaatggccacgtttagaggaattaaagtgggttatacggctcatatacgcaaagcaacggaacccgtgtttgagggtatcaagtctcgcctggaacagtggtttggggcaaattacgtggatcatgtaaaaggcgaatctattacgttttcatttaccgacgggtcttacagcacagcggtgttcgcgtcaagtcacaacacaaacgtgagtgttttataaatttaacctttaatatattactgtaaatgttgacatatacctttccacaacggcggttgagttaaggtatactaggtggttgtaggttccggttcacccgataatctttgtgtctcggggaagcaaattcgctgaagcagaccacagccgttaataatagcccggcttaatgtttctccaaacatataaagctgccacccagatgaatttactggtacagagagaccactggcgttggttcccgctataacgtcgccaagatttgcggtaatgcgaggatttttagtactcgtaattcgaatgcaggtggtgacatctacaaaaagaacctgcgtggcgccaatgtctacctccacttttaattcccgctgaccggcctttctccacatacacggagcccaacacacacaaccttccgcatgatttgtgacatggggtaacgcatacagtgcccccacgtgaactctatgattacattcatcacatccgtccgcatggctgaggagtcgatttaatacagagccaagtatccgagcatgccatccggcgggacatagccctattaaattaggttccatagccagtacatataaacgccttcgttcgtctgaccaccacactcccggagaaataactttacatgcgtatggatttttcggaagccgcgggggttgtaagtagttgcttaagtttggcgttggtgtaagatctgcgggggtgggatctgctcgaggatccggaatagatgttggaagggggtacgcgatcgggttcttaaacgttgctccaaaaacatggtctatgttttcaaccggataaattcttaaagtcgccgtcattgcgtacgagacctcgtaattaaaatttacaattacatgaaaagtcttcggaggtaagttcatctgacgtgggcgcgtgatgtaaattgtggctacaacaacggcaatattagtagtatccgtttgaagggggataaacggagcgatccttaaagttataaaagcagttgatcgcattattttcacccggggatcggtcaggatggacttccataatcccatatccagcgttaatgcatcgcagagtctctgaactgcctcgggggttaatttgcgcgctgcacccgtagcggtgtacagcggaaatatgcgttgtaattccatgagcagaaaaacagtctagcggattgccgcccgggtacttgtgggtttaatgccacccacccggttattttatattttaagagggggtggaaacgggagaaatgacgtaaaattacatatgaagagattctggtgttatgtttttatagtgacactaatttatttatgggggttgggaatagagaagcagaatctgtctagaataggtccgattaacgatgcaggtagtgctgcctgtagggtatcggtaatacaaaaacatgccgcaaatccccccggtaaaactaaaatggattgtaattgctggttaaatcctagacaaatgtacgcgtaacattgaccgggtaaatacttagaacaaattccaatatcaacaatatccgcgctgcgtataaatttacccctcagttgtgtggaattaccaataccaaccttttctaaggctacgggaacggggaccttggaaagcttaagtatttcccctcctgaattataatagtcaaataaatatatagaacgattacctaaccagcatgggaaggaagcgtgaaggtagggtatataccccccaccttgtggtcgtgtatatacagatgacagatacgccaaaaccgcatacatcaaggagctgttataaaacgcatccattgacatttccgttaacaccgaaactatagtctgaatcaggtctggtgtgcgggctacaatttcatcaataaccgtttgggaagaatctgcaatatcatattccatgagttgttgtagagtcgggttcgtttgtaactccgttataagaccttgggttagcgatgtcacacacgcttgtttaaatacctggtttaaaaacatttcggcgcctggtttaaaggcgggtaagggggtttgattatttaggacgttagccaaaaacggtaaacgcgcgactagctcttggcgagctgtcacatgtaggctttggggattgtcaacccgggcatttatacacgcagcatcaataatagcctgtgcagagtgatataaaattggacttccggtaatacgtcctccccaggcagaggatccgttgtaagatactacaatcaacggactgggggattctgcgtaatgtcgcggtacaattgataggggacgccgtttccagaaatctgctggagtgtccccgctaactaattgggcataacagatgtcgaaccattccataagactttggggttctgtcgaagctggggtaaacaatagaacgtcttgtaaaggtgggatgctggcggacgaattgtttttctttcccgtaaatcgcccttgtccaggcggctcaaggacgccatcaaaggaaccgttattgatcggatctgtgttggaagtttgcgctccgtggccctttgcactttgaagcaacccagatgcaacgcgggaactagaaggtcggacggggtgcctggagttaacaatgtttacggcccgttttattagctcaaggacgtcccgattattttcctgtatgcgtgtttcagcaggggagtcatcaatacctccagaagttaactgtcgatcaagatcgattatggatgaaacgggtccaatattgtccccatttgacgtgtgtgattcacccatggctgccaccatatgctctgcgtatatttttatagacgatgcaagacgaggggtgcatcggatatacgcaatcagctgtttgcataataaaagtacccgttgtccatcagcaaaataacgcgttccgtttgggattagttctgcatacataatacaaatatcacggtgcttgcggtttccagtatttattcgtatcgctacaacgttaaatgcatcaaagaataaaccggggctaagataaacaggcaatgataaaatcaatccccctgaattatgcgtggccgaaaaaacgtgtgaaacaaatggttccgtttttggtattaagagatttgttaaggcgttatcgggaatgtacgcggcgaaaacttgacaccacggttcgcattgacctgtagcatgatatcttgtttgtacttcaaccttgaagcgttgtccgggtttctttaaaatcagtaatgcgggatctattccggccgcaataagccccgcgttaggtatcacaacgtgtagtaatccttttgtgtgatcattatgccaaagtgcatgtttggtttcatttgccaaatgggcttccattatacaccggatatggttgtactggaaaaaaaaaagaaatatgtacgtattcaaacattttttacgtacgtggtatttaaggatacatttaaactttggtggggtaactatatatctttctatcgttccagggtatccgaggtcaagattttaatcttctgtttgtggatgaagctaattttattcgacctgatgctgtacaaactatagtcggatttttaaatcaaaccaattgtaaaattatttttgtttcatcaacaaataccggaaaagcaagtacaagttttttgtataacttacgtggatcgtcggatcagttgttaaacgttgttacatatgtatgcgacgatcacatgccgcgtgttttagcacatagcgatgtcacagcttgttcgtgttatgtattaaataagccggttttcatcacaatggatggagccatgcggcgcactgcagatttatttatggccgactccttcgtgcaggaaattgtaggtgggcgtaaacagaattctgggggtgtggggtttgaccggccattatttacaaaaactgcccgtgagaggtttattttatatcggccgtcaaccgttgcgaattgtgctatattatcgtcagtgttgtacgtttacgtagaccctgcatttacctcaaatacacgagcgtctggtactggtgtagcgattgttggtcgttataagtcggattggattatatttggattggagcacttttttcttagagctttaactggcacgtcttccagtgagatagggcgttgcgttactcaatgcttaggccacatactcgctttacaccccaatacatttacaaacgtacacgtttctatagagggaaacagcagccaggattctgcagttgccatatcgttggctatagcacaacagtttgctgtcctcgaaaagggaaacgtgctatcttccgctccagtgttactgttttatcattccatacctcccggatgtagcgtggcgtaccctttttttttattacaaaaacaaaaaacgccggccgtagactattttgttaaacgatttaactccggaaatataatagcctcacaggagcttgtatccctaacagtaaagttaggtgtagaccccgtggagtatctatgtaaacagttggataacctgacagaggtaattaaaggcggtatgggtaatctagacacaaaaacttacacgggtaaaggtaccacgggaacaatgtcagatgatctgatggttgcattaattatgtccgtgtatattggcagttcatgtataccggattccgtgtttatgcctattaaataa

SEQ ID NO: 81 - protein, 747 aa, Varicella zoster
MSLIMFGRTLGEESVRYFERLKRRRDERFGTLESPTPCSTRQGSLGNATQIPFLNFAIDVTRRHQAVIPGIGTLHNCCEYIPLFSATARRAMFGAFLSSTGYNCTPNVVLKPWRYSVNANVSPELKKAVSSVQFYEYSPEEAAPHRNAYSGVMNTFRAFSLSDSFCQLSTFTQRFSYLVETSFESIEECGSHGKRAKVDVPIYGRYKGTLELFQKMILMHTTHFISSVLLGDHADRVDCFLRTVFNTPSVSDSVLEHFKQKSTVFLVPRRHGKTWFLVPLIALVMATFRGIKVGYTAHIRKATEPVFEGIKSRLEQWFGANYVDHVKGESITFSFTDGSYSTAVFASSHNTNGIRGQDFNLLFVDEANFIRPDAVQTIVGFLNQTNCKIIFVSSTNTGKASTSFLYNLRGSSDQLLNVVTYVCDDHMPRVLAHSDVTACSCYVLNKPVFITMDGAMRRTADLFMADSFVQEIVGGRKQNSGGVGFDRPLFTKTARERFILYRPSTVANCAILSSVLYVYVDPAFTSNTRASGTGVAIVGRYKSDWIIFGLEHFFLRALTGTSSSEIGRCVTQCLGHILALHPNTFTNVHVSIEGNSSQDSAVAISLAIAQQFAVLEKGNVLSSAPVLLFYHSIPPGCSVAYPFFLLQKQKTPAVDYFVKRFNSGNIIASQELVSLTVKLGVDPVEYLCKQLDNLTEVIKGGMGNLDTKTYTGKGTTGTMSDDLMVALIMSVYIGSSCIPDSVFMPIK

SEQ ID NO: 82 - DNA, 1308 bp, Varicella zoster
  CDS (1)..(1308)
atgggaactcaaaagaaggggccgcgttctgaaaaagtctcgccgtacgacaccacgacacccgaggtggaagcgttagatcatcaaatggatacgcttaattggcgaatttggataattcaggtgatgatgttcactttgggtgcggtaatgctcctggctacgttaattgccgcctcttctgaatataccgggatcccttgtttttatgctgccgtagttgattatgagttatttaacgccaccctagatgggggggtatggtccggaaatagaggtggatacagcgccccggttttgtttttggaaccacatagcgttgtggcatttacttactacacggctttaacggcaatggccatggcggtatatacactgatcacggccgcgattatacaccgagaaacgaaaaatcaacgtgtccggcaaagctccggtgttgcatggttagttgtagatcccacaacacttttttggggtcttttgtcattgtggttattaaacgccgttgtgttattattagcttacaagcaaatcggcgtggctgctacattatatcttggacattttgcgacaagtgtaatatttacaacgtatttttgtggacgcggaaaattggacgaaacgaacataaaagcggtcgcaaatttacgacagcagagcgtctttttatatcgccttgcggggcctacgcgcgcagtgttcgtgaatttgatggctgcgttgatggcgatatgtatcctatttgtatcattaatgctggaacttgtggtggcgaatcatctacatacgggactgtggtcatcggtgtccgtggccatgtctacatttagtacattgtcagttgtatatcttatagtatcagaattaattttggcgcattatatacacgtgttaataggaccgtccctgggaacgctcgtggcctgtgctacgttgggaaccgccgcgcactcgtatatggaccgattatatgaccctatatcggttcaatctccacggttaattcccacaactcggggaaccttggcttgcctggccgtgttttccgttgtcatgttgcttctcagattgatgcgtgcatatgtgtatcatcgacagaaacgcagtcggttctacggtgccgtaagaagagtacccgagcgggtacggggatacatacgaaaagtaaaacctgcacatagaaattctcgccgcacaaattacccatcacaaggctacggctacgtctatgaaaatgactcaacatatgaaacggaccgcgaggatgagctgttatacgagcgatcaaacagtgggtgggagtag

SEQ ID NO: 83 - protein, 435 aa, Varicella zoster
MGTQKKGPRSEKVSPYDTTTPEVEALDHQMDTLNWRIWIIQVMMFTLGAVMLLATLIAASSEYTGIPCFYAAVVDYELFNATLDGGVWSGNRGGYSAPVLFLEPHSVVAFTYYTALTAMAMAVYTLITAAIIHRETKNQRVRQSSGVAWLVVDPTTLFWGLLSLWLLNAVVLLLAYKQIGVAATLYLGHFATSVIFTTYFCGRGKLDETNIKAVANLRQQSVFLYRLAGPTRAVFVNLMAALMAICILFVSLMLELVVANHLHTGLWSSVSVAMSTFSTLSVVYLIVSELILAHYIHVLIGPSLGTLVACATLGTAAHSYMDRLYDPISVQSPRLIPTTRGTLACLAVFSVVMLLLRLMRAYVYHRQKRSRFYGAVRRVPERVRGYIRKVKPAHRNSRRTNYPSQGYGYVYENDSTYETDREDELLYERSNSGWE

SEQ ID NO: 84 - DNA, 2310 bp, Varicella zoster
  CDS (1)..(2310)
atggccgaaataacgtctctttttaataacagttccggtagtgaagaaaaaaggatagcaagttctgtttctattgaccagggcttgaatggaagtaacccaaatgaccaatacaagaacatgttcgatatatactggaatgagtacgccccggatatagggttttgtacatttccggaggaagatggctggatgttaatacacccaaccacgcaaagtatgttgtttcgaaaaatcctagccggtgactttggatataccgatggacaaggcatatatagcgctgtacggtctacggaaactgtaattcgccaagttcaggcaaccgttttgatgaacgcgttggatgcaactcggtatgaggacctagcagcagattgggaacaccacatccaacaatgtaacctgcatgccggggctctagcggaacgttatgggctatgtggagaatcagaagccgtacggcttgcacatcaggtttttgaaacctggcgtcaaacattacagtcatcgttacttgagtttctgcgtggaataaccggttgtctctataccagtggtttaaatggaagggtcggttttgccaaatacgtggactggatagcctgtgtaggtattgtgcccgttgtaagaaaggtacgatcagaacagaatggaacccctgcaccattaaatacgtatatgggtcaagcggcagaactgtcccagatgttaaaagttgccgatgcaacgttggccagaggagcggcggttgtcacaagcctagttgagtgtatgcaaaatgttgctattatggattatgataggacgcgtctttattataattataaccgaagattaattatggcaaaggatgatgtaacgggcatgaagggagagtgtttggtcgtgtggccgcccgttgtatgtggggagggtgtagtatttgactcacccttacagcggctttctggggaggtgttggcctgttatgcattacgtgaacatgctcgcgtctgccaagttttaaatacagcccctttgcgcgtgttaataggtcgccggaatgaagatgatagatctcacagcacacgtgcggttgatcgtataatgggcgagaacgatacaacacgggctggatcggccgcgtctagacttgtaaagctaatagttaacttaaaaaacatgagacatgttggagatattaccgaaaccgtacgttcctatctagaagaaacgggcaatcacattctggaaggaagtggatcggtggacacatcacaaccggggtttggcaaggccaaccaatcctttaacgggggggcaatgtccggaacaacaaacgttcaaagtgcgtttaaaacttcggtggttaacagtatcaacggcatgctcgagggttatgtgaataatttattcaaaaccattgagggtctcaaggatgtgaacagcgatctgaccgaaaggctccagttcaaagaaggagagctgaaacggttacgggaagagagggtaaaaataaagccatctaaagggtcacatattacaatggcagaagaaacacgtattgccgatttaaatcacgaggttatagatcttaccggcataataggggatgatgcatatattgccaatagttttcaatctcgttatatccccccttatggagatgatataaaacgtttgtctgagctatggaaacaggaacttgttcgctgttttaagcttcaccgggtaaacaataatcaaggccaggaaatttctgtatcatattcaaatgcgtcaatctcattactagttgcgccgtatttttcattcatattacgggccacccgattaggattcttggtaactcaaagcgaggtacataggtcagaggaagagttatgccaggctatttttaaaaaggcgagaacagagtcctatttatcccaaatccgaatattatatgaaatgcaggttcgcgcagaggtaataaaacggggcccacggagaacaccaagtccttcctggggtttgcctgaccctacagaagatgacgaaagaatcccggaacccaataaaataaataaccaatacatgcatgttggatataaaaacctatcccattttatgaaaggacacccccctgagaggttacgggtacacaaggtaaatgcagcggattcgaccttactggataaaattcgagcaaaccggaggcgcggggatggccgatgggatgtccggaataaatatacccagcattttaggttgcagcgtaacgatcgacaacttactaacacgagccgaagaggggttggatgtgagcgacgtgatcgaagatcttag

SEQ ID NO: 85 - protein, 769 aa, Varicella zoster
MAEITSLFNNSSGSEEKRIASSVSIDQGLNGSNPNDQYKNMFDIYWNEYAPDIGFCTFPEEDGWMLIHPTTQSMLFRKILAGDFGYTDGQGIYSAVRSTETVIRQVQATVLMNALDATRYEDLAADWEHHIQQCNLHAGALAERYGLCGESEAVRLAHQVFETWRQTLQSSLLEFLRGITGCLYTSGLNGRVGFAKYVDWIACVGIVPVVRKVRSEQNGTPAPLNTYMGQAAELSQMLKVADATLARGAAVVTSLVECMQNVAIMDYDRTRLYYNYNRRLIMAKDDVTGMKGECLVVWPPVVCGEGVVFDSPLQRLSGEVLACYALREHARVCQVLNTAPLRVLIGRRNEDDRSHSTRAVDRIMGENDTTRAGSAASRLVKLIVNLKNMRHVGDITETVRSYLEETGNHILEGSGSVDTSQPGFGKANQSFNGGAMSGTTNVQSAFKTSVVNSINGMLEGYVNNLFKTIEGLKDVNSDLTERLQFKEGELKRLREERVKIKPSKGSHITMAEETRIADLNHEVIDLTGIIGDDAYIANSFQSRYIPPYGDDIKRLSELWKQELVRCFKLHRVNNNQGQEISVSYSNASISLLVAPYFSFILRATRLGFLVTQSEVHRSEEELCQAIFKKARTESYLSQIRILYEMQVRAEVIKRGPRRTPSPSWGLPDPTEDDERIPEPNKINNQYMHVGYKNLSHFMKGHPPERLRVHKVNAADSTLLDKIRANRRRGDGRWDVRNKYTQHFRLQRNDRQLTNTSRRGVGCERRDRRS

SEQ ID NO: 86 - DNA, 666 bp, Varicella zoster
  CDS (1)..(666)
atgttttcggagttgcctccttccgtaccgacggcattgcttcaatggggttggggattgcatcgtggaccgtgttcgatcccaaattttaaacaggtagccagccaacacagtgttcagaacgattttacagaaaatagcgttgatgcaaatgaaaaatttccgattgggcacgcgggctgtattgagaaaaccaaagacgactatgtaccatttgatacgttgttcatggtatcatctattgacgaacttgggcggagacaattaaccgacaccatccgccgcagcttggttatgaacgcctgtgaaataacggtcgcgtgtacgaaaaccgcagccttttctggtcgaggcgtgtcacgacaaaaacacgtgaccctatctaaaaataaattcaatccatccagtcataagagcctgcaaatgtttgtgttgtgtcaaaaaacccatgcaccccgtgtcagaaacctactgtacgagagtattcgtgcaagaagacctcgccgatattacacccgctcaacggacggaaaatcgcgtccgttggtaccagtgtttgtgtatgagtttacggctttagatcgtgtccttttacataaggaaaatactttgaccgaccaaccaattaatactgaaaatagcggtcatggacgtacgagaacgtaa

SEQ ID NO: 87 - protein, 221 aa, Varicella zoster
MFSELPPSVPTALLQWGWGLHRGPCSIPNFKQVASQHSVQNDFTENSVDANEKFPIGHAGCIEKTKDDYVPFDTLFMVSSIDELGRRQLTDTIRRSLVMNACEITVACTKTAAFSGRGVSRQKHVTLSKNKFNPSSHKSLQMFVLCQKTHAPRVRNLLYESIRARRPRRYYTRSTDGKSRPLVPVFVYEFTALDRVLLHKENTLTDQPINTENSGHGRTRT

SEQ ID NO: 88 - DNA, 480 bp, Varicella zoster
  CDS (1)..(480)
atggcatcacataaatggttactgcagatagtttttttaaaaactatcacaatcgcgtattgtcttcatctccaagacgacactccgttgttttttggagccaaaccgctatcggatgtgagtttgattataacggaaccgtgcgtgtcatcggtatatgaggcgtgggactatgcggcacccccggtatcaaacctcagcgaggcgctatcgggaatcgtggttaagacaaaatgtccagtaccggaagttatactttggtttaaagacaaacaaatggcgtactggacaaatccatacgtcaccttaaaggggctggcacaatctgttggtgaagaacataaaagcggggacatacgcgatgctttgttggatgccctttccggtgtatgggtagactctactccatcttccacaaatatcccggaaaatggatgtgtctggggagccgaccgtttgttccaacgcgtatgccaatga

SEQ ID NO: 89 - protein, 159 aa, Varicella zoster
MASHKWLLQIVFLKTITIAYCLHLQDDTPLFFGAKPLSDVSLIITEPCVSSVYEAWDYAAPPVSNLSEALSGIVVKTKCPVPEVILWFKDKQMAYWTNPYVTLKGLAQSVGEEHKSGDIRDALLDALSGVWVDSTPSSTNIPENGCVWGADRLFQRVCQ

SEQ ID NO: 90 - DNA, 909 bp, Varicella zoster
  CDS (1)..(909)
atggcttctgtagcaggtaacgctagtaatatctcaccacagcccccgtcgggcgttccaaccggaggggaatttgtactgatacctaccgcgtattattcacagctgttaaccgggcagactaaaaatccgcaggtatcaattggagctccaaataacggacagtatatcgtcgggccatatggatctccacacccgcctgccttcccacctaatacagggggttatggttgccctccgggacacttcgggggaccgtacgggtttccgggatatccaccacccaatcgtttggaaatgcaaatgtccgcatttatgaacgcattggccgccgaacggggtattgacttgcagaccccgtgtgtaaattttccagacaaaaccgatgtccgtcgtccaggaaaacgggatttcaagagcatggatcaaagggaattggattctttttatagtggggagtctcaaatggacggagagtttccctcaaatatatattttcccggtgaaccaacgtatataacgcatcggagacgtcgagtttctccatcatattggcagaggagacacagagtttctaatggtcagcacgaagagcttgctggggttgtggcaaaactgcaacaggaggttacagagctaaaatcacaaaatgggacacaaatgcctttgtcgcaccatacaaatataccagaggggacacgggatcctcgaatatcgattttattaaaacagcttcaaagcgtttcgggtctatgctcatcccaaaatacaacaagcaccccacatacagatacagttggacaagatgtaaatgcagtggaggcgagttccaaggcccctttaatacaggggtccacggcagacgacgccgatatgtttgcaaatcagatgatggtggggcggtgttaa

SEQ ID NO: 91 - protein, 302 aa, Varicella zoster
MASVAGNASNISPQPPSGVPTGGEFVLIPTAYYSQLLTGQTKNPQVSIGAPNNGQYIVGPYGSPHPPAFPPNTGGYGCPPGHFGGPYGFPGYPPPNRLEMQMSAFMNALAAERGIDLQTPCVNFPDKTDVRRPGKRDFKSMDQRELDSFYSGESQMDGEFPSNIYFPGEPTYITHRRRRVSPSYWQRRHRVSNGQHEELAGVVAKLQQEVTELKSQNGTQMPLSHHTNIPEGTRDPRISILLKQLQSVSGLCSSQNTTSTPHTDTVGQDVNAVEASSKAPLIQGSTADDADMFANQMMVGRC
